(19) United States
(12) Patent Application Publication
(10) Pub. No.: US 2025/0041404 A1
(43) Pub. Date: Feb. 6, 2025

(54) T Cell Modulatory Polypeptides with Conjugation Sites and Methods of Use Thereof

(71) Applicant: Cue Biopharma, Inc., Boston, MA (US)

(72) Inventors: Ronald D. SEIDEL, III, Natick, MA (US); Rodolfo J. CHAPARRO, Cambridge, MA (US); John F. ROSS, Arlington, MA (US); Chee Meng LOW, Boston, MA (US); Anish SURI, Boston, MA (US); Raymond J. MONIZ, Brighton, MA (US); Gurpanna SAGGU, Westwood, MA (US)

(21) Appl. No.: 18/771,965

(22) Filed: Jul. 12, 2024

Related U.S. Application Data
(63) Continuation of application No. PCT/US2023/010767, filed on Jan. 13, 2023.
(60) Provisional application No. 63/299,405, filed on Jan. 13, 2022.

(51) Int. Cl. A61K 39/215; A61K 39/00; A61K 47/64; A61P 31/04; A61P 31/14; C12N 7/00

(52) U.S. Cl. CPC A61K 39/215; A61K 39/00114; A61K 47/646; A61P 31/04; A61P 31/14; C12N 7/00; A61K 2039/605; C12N 2770/20034

(57) ABSTRACT

The present disclosure provides T cell modulatory polypeptide-epitope conjugates (T-Cell-MP-epitope conjugates) comprising a chemical conjugation site at which a coronavirus peptide epitope is covalently attached and at least one immunomodulatory polypeptide sequence. The T-Cell-MP-epitope conjugates are useful for modulating the activity (e.g., increasing proliferation or cytotoxic activity) of T-cells specific to the coronavirus peptide epitope in an epitope selective/specific manner, and accordingly, for treating individuals with a coronavirus infection including long COVID. Alternatively, when the T-Cell-MP-epitope conjugate is redirected to a neoplastic cell by a targeting sequence, the redirected T-Cell-MP-epitope conjugate may be used to treat neoplasms including various cancers.

[0001] This application claims the benefit of U.S. Provisional Patent Application No. 63/299,405, filed Jan. 13, 2022.

### I. INCORPORATION OF SEQUENCE LISTING

[0002] The sequence listing in ST.26 XML format entitled 2910-30_PCT_ST26.xml, created on Jan. 13, 2023, comprising 2,834,559 bytes, prepared according to 37 CFR 1.822 to 1.824, submitted concurrently with the filing of this application, is incorporated herein by reference in its entirety.

### II. INTRODUCTION

[0003] Coronaviruses including MERS-CoV, Bat-SL-CoV, SARS-CoV, and SARS-CoV-2 (COVID-19) have been associated with a number of disease outbreaks having high lethality rates (e.g., Severe Acute Respiratory Syndrome or “SARS” and Middle East Respiratory Syndrome or “MERS”). The ability to induce an adaptive immune response to such viruses involves the engagement of the T cell receptor (TCR), present on the surface of a T-cell, with a small peptide antigen of the virus that is non-covalently presented on the surface of an antigen presenting cell (APC) by a major histocompatibility complex (MHC; also referred to in humans as a human leukocyte antigen (HLA) complex). This engagement represents the adaptive immune system's targeting mechanism and is a requisite molecular interaction for T cell modulation (activation or inhibition) and effector function. Following epitope-specific cell targeting, the targeted T-cells are activated through engagement of costimulatory proteins found on the APC with counterpart costimulatory proteins on the T-cells. Both signals—epitope/TCR binding and engagement of APC costimulatory proteins with T cell costimulatory proteins—are required to drive T cell specificity and activation or inhibition. The TCR is specific for a given epitope; however, the costimulatory protein is not epitope specific and instead is generally expressed on all T-cells or on large T cell subsets.

[0004] Cells of the innate immune system, including natural killer (“NK”) cells, may also respond to coronavirus infections including SARS-CoV-2 infections and may be activated in patients with acute coronavirus disease (see e.g., Hammer et al. Cell Reports 38:110503 (2022)).

### III. SUMMARY

[0005] The present disclosure provides T cell modulatory polypeptides (a “T-Cell-MP” or multiple “T-Cell-MPs”) that find use in, among other things, methods of in vivo and/or in vitro treatment of various viral infections or diseases (e.g., coronavirus infection or COVID disease) and associated disorders of mammals (e.g., humans) and the preparation of medicaments for such treatments. In one aspect, the T-Cell-MPs described herein comprise a portion of an MHC class I heavy chain (MHC-H) polypeptide, a β2M polypeptide, a chemical conjugation site for covalently attaching an epitope presenting molecule, and at least one immunomodulatory polypeptide (also referred to herein as a “MOD polypeptide” or, simply, a “MOD”). Any one or more of the MODs present in the T-Cell-MP may be wild-type (“wt.”) or a variant that exhibits an altered binding affinity to its cellular binding partner/receptor (e.g., T cell surface), referred to as a Co-MOD.

[0006] T-Cell-MPs as initially prepared are unconjugated, in which case they comprise at least one chemical conjugation site at which a molecule comprising a target antigenic determinate (e.g., a peptide, glycopeptide, or non-peptide such as a carbohydrate presenting an epitope from a coronavirus) may be covalently bound to form a T-Cell-MP-epitope conjugate (e.g., a T-Cell-MP-coronavirus epitope conjugate) for presentation of the epitope to a cell bearing a T cell receptor. Unconjugated T-Cell-MPs comprising a chemical conjugation site for linking an epitope are useful for rapidly preparing T-Cell-MP-epitope conjugates that can modulate the activity of T cells specific to the epitope presented and, accordingly, for modulating an immune response involving those T cells in an individual.

[0007] The T-Cell-MPs described herein are suitable for production in cell-based expression systems where most, or substantially all (e.g., greater than 75%, 85% or 90%) or all, of the expressed unconjugated T-Cell-MP polypeptide/protein is in a soluble non-aggregated state that is suitably stable at 37° C. for production in tissue culture and use up to at least that temperature. Greater than 85% or 90% of the expressed unconjugated T-Cell-MP polypeptide/protein may be in a soluble non-aggregated state that is suitably stable at 37° C. for production in tissue culture and use at least up to that temperature. The T-Cell-MPs can advantageously be produced as a single polypeptide encoded by a nucleic acid sequence contained in a single vector. The T-Cell-MPs may form higher order structures, such as duplexes (see, e.g., FIG. 1), which may be a homodimer as in FIG. 9, or heterodimeric when formed from two T-Cell-MPs, e.g., as illustrated in FIGS. 10 and 11. Unconjugated T-Cell-MPs can be expressed in favorable yields, e.g., greater than 25, 40, 60, or 80 mg/liter (e.g., about 25 to about 40, about 40 to about 60, or about 60 to about 80 mg/l in CHO cells). Yields can be high especially when a disulfide bond is present between the carboxyl end of the MHC-H chain α₁ helix and the MHC-H chain α₂₋₁ helix (e.g., a Y84C to A139C disulfide bond), and the linker between the MHC-H polypeptide sequence and the β2M polypeptide is of sufficient length (e.g., from about 10 to about 50 aas long). With the disulfide bond present between the α₁ and α₂ helices, unconjugated T-Cell-MP expression levels may exceed 80 mg/l (e.g., from about 80 to about 100, about 100 to about 120, about 120 to about 140, about 140 to about 160, about 160 to about 180, or about 180 to about 200 mg/l).

[0008] Once purified, most, substantially all (e.g., greater than 85% or 90% of the T-Cell-MP), or all of the expressed unconjugated T-Cell-MP protein remains in a soluble non-aggregated state even after conjugation to an epitope (e.g., peptide epitopes) and is similarly stable compared to the unconjugated T-Cell-MP.

[0009] As indicated above, T-Cell-MP-epitope conjugates may comprise wt. or variant MODs (e.g., IL-2, 4-1BBL, FasL, TGF-β, CD70, CD80, CD86, OX40L, ICOS-L, ICAM, JAG1 or variants thereof). The unconjugated T-Cell-MPs and their epitope conjugates may additionally comprise a targeting sequence that can direct a T-Cell-MP-epitope conjugate to a particular cell or tissue (e.g., a cancer cell or virus infected tissue or cell). The T-Cell-MPs and their epitope conjugates may additionally comprise sites for the conjugation and delivery of payloads such as antiviral agents for co-delivery with a MOD. Payloads include, but are not limited to, bioactive substances and labels, such as a therapeutic (e.g., antiviral agents or immunomodulator molecules) and may be covalently attached to a T-Cell-MP, such as by a crosslinking agent. In view of the foregoing, T-Cell-MP-epitope conjugates may be considered a means by which to deliver MODs and/or payloads (e.g., labels or antivirals) to cells in an epitope-specific manner, optionally with the assistance of a targeting sequence.

[0010] The T-Cell-MPs may comprise modifications that assist in the stabilization of the unconjugated T-Cell-MP during intracellular trafficking and/or following secretion by cells expressing the multimeric polypeptide even in the absence of an associated epitope (e.g., a peptide epitope). One such modification is a bond (e.g., disulfide bond) formed between amino acid position 84 at the carboxyl end of the MHC class I α₁ helix (or its flanking amino acid sequences aac1 and aac2) and amino acid position 139 at the amino end of the MHC-class I α₂₋₁ helix (or its flanking amino acid sequences aac3 and aac4). For example, the insertion of cysteine residues at amino acids 84 (Y84C substitution) and 139 (A139C substitution) of an HLA-A heavy chain, or the equivalent positions of other MHC-H polypeptide chains (see, e.g., FIG. 3I), may form a disulfide linkage that stabilize the T-Cell-MP. See, e.g., Z. Hein et al. (2014), Journal of Cell Science 127:2885-2897.

[0011] One aspect of the T-Cell-MP molecules described herein is broadly directed to an unconjugated T-Cell-MP, the polypeptide comprising (e.g., from N-terminus to C-terminus):
[0012] (i) optionally one or more MOD polypeptide sequences (e.g., two or more MOD polypeptide sequences, such as in tandem, wherein when there are two or more MOD polypeptide sequences they are optionally joined to each other by independently selected L1 linkers);
[0013] (ii) an optional L2 linker polypeptide sequence joining the one or more optional MOD polypeptide sequences to a β2M polypeptide sequence;
[0014] (iii) the β2M polypeptide sequence;
[0015] (iv) an optional L3 linker polypeptide sequence (e.g., from 10-50 aa in length);
[0016] (v) a class I MHC-H polypeptide sequence;
[0017] (vi) an optional L4 linker polypeptide sequence;
[0018] (vii) a scaffold polypeptide sequence (e.g., an immunoglobulin (Ig) Fc sequence);
[0019] (viii) an optional L5 linker polypeptide sequence; and
[0020] (ix) optionally one or more MOD polypeptide sequences (e.g., two or more MOD polypeptide sequences, such as in tandem, wherein when there are two or more MOD polypeptide sequences they are optionally joined to each other by independently selected L6 linkers);
[0021] wherein the unconjugated T cell modulatory polypeptide comprises at least one MOD polypeptide sequence (e.g., the MOD(s) of element (i) and/or (ix); and
[0022] wherein at least one of the β2M polypeptide sequence, the L3 linker polypeptide sequence, and/or the MHC-H polypeptide sequence comprises a chemical conjugation site (e.g., provided by protein engineering, such as a cysteine substitution) for epitope conjugation.

[0023] It is understood that such unconjugated T-Cell-MPs do not comprise a covalently attached moiety presenting an epitope, such as a peptide presenting an epitope (e.g., peptide, phosphopeptide, or glycopeptide epitope); however, the disclosure includes and provides for T-Cell-MP-epitope conjugates that further comprise a covalently attached peptide presenting an epitope from a coronavirus. The covalently attached peptide presenting a coronavirus epitope can be positioned within the binding cleft of the MHC-H/β2M polypeptide sequences and presented to a TCR, thereby permitting use of the molecules as agents for clinical testing and diagnostics, and as therapeutics, with respect to coronavirus. The T-Cell-MPs and their epitope conjugates described herein represent scalable antigen presenting cell-independent (APC-independent) immunotherapeutics that enable clinically effective levels of coronavirus antigen specific T cell modulation (e.g., inhibition or activation) depending on the MOD(s) present. Moreover, the scaffold portions of T-cell-MPs, which may be Ig Fc domains, permit multivalent presentation of MHC-epitope conjugate and MOD moieties to cognate T cells sufficient for their activation.

[0024] The T-Cell-MP-coronavirus epitope conjugates described herein may be employed for the treatment of primary infections by coronaviruses, but also may be employed for the treatment of patients known as “Long Haulers” suffering from prolonged effects of coronavirus infections termed Post Acute Sequelae of COVID-19 (PASC) or “Long COVID”. As defined by the U.S. Dept. of Health & Human Services: “Long COVID is broadly defined as signs, symptoms, and conditions that continue or develop after initial COVID-19 or SARS-CoV-2 infection. The signs, symptoms, and conditions are present four weeks or more after the initial phase of infection; may be multisystemic; and may present with a relapsing-remitting pattern and progression or worsening over time, with the possibility of severe and life-threatening events even months or years after infection. Long COVID is not one condition. It represents many potentially overlapping entities, likely with different biological causes and different sets of risk factors and outcomes.” On the World Wide Web at www.covid.gov/longcovid/definitions.

[0025] In addition to β2M, MHC Class I heavy chain, MOD and scaffold sequences, T-Cell-MPs may comprise additional polypeptide sequences, including targeting sequences. Targeting sequences permit T-Cell-MP-epitope conjugates to bind or associate with target cells and cell and tissues, such as cells of benign, precancerous, or malignant neoplasms. T-Cell-MP-epitope conjugate binding to target cells and/or tissues thereby permits T cells specific for the conjugated epitope to act upon (e.g., in granule dependent and/or granule independent manner) and thereby reduce or ablate the target cells and/or tissues. The inclusion of targeting sequences thereby permits T cells specific for conjugated epitopes prevalent in a population (e.g., T cells specific to antigens of utilized for vaccines against coronaviruses or other viruses such as adenovirus) to be recruited and used for the treatment of various disease such as cancers.

### IV. BRIEF DESCRIPTION OF THE DRAWINGS

[0026] FIG. 1 depicts preferential activation of an epitope-specific T cell relative to a T cell that is not specific for the epitope presented by an embodiment of a duplex T-Cell-MP-epitope conjugate. That conjugate has an indirect (via a linker) covalent attachment of the epitope to the β2M polypeptides and bears MODs, which can be wt. and/or variant MODs (e.g., having reduced affinity for their receptors (Co-MODs)). The first, epitope-specific T cell is activated due to productive engagement of both the TCRs and Co-MODs. In contrast, the second, T cell that is not specific for the presented epitope is not activated as the epitope cannot engage the TCR, and thus the MODs by themselves do not lead to productive engagement of the T-Cell-MP-epitope conjugate. The location of optional linkers are represented by black lines joining T-Cell-MP elements.

[0027] FIGS. 2A-2H provide amino acid sequences of Ig heavy chain polypeptides (including SEQ ID NOs: 1-13).

[0028] FIG. 2I provides the sequence of a human Ig J-chain (SEQ ID NO:14).

[0029] FIG. 2J provides the sequence of an Ig CH1 domain sequence (SEQ ID NO:15).

[0030] FIG. 2K provides sequences of Ig κ and Ig λ chains (SEQ ID NOs: 16-17).

[0031] FIGS. 3A, 3B and 3C provide amino acid sequences of human major histocompatibility complex class I heavy chain (MHC-H; also known as human leukocyte antigen (HLA) Class I heavy chain) polypeptides. Signal sequences, aas 1-24, are bolded and underlined. FIG. 3A entry: 3A.1 is the HLA-A heavy chain (HLA-A*01:01:01:01 or A*0101) (NCBI accession NP_001229687.1), SEQ ID NO: 18; entry 3A.2 is HLA-A*1101, SEQ ID NO: 19; entry 3A.3 is HLA-A*2402, SEQ ID NO:20, and entry 3A.4 is HLA-A*3303, SEQ ID NO:21. FIG. 3B provides the sequence for HLA-B*07:02:01 (HLA-B*0702) (NCBI GenBank Accession NP_005505.2), SEQ ID NO:22. FIG. 3C provides the sequence for HLA-C*0701 (GenBank Accession NP_001229971.1; EMBK-EBI Accession HLA00433), SEQ ID NO: 23.

[0032] FIG. 3D provides an alignment of all, or substantially all, of the α1, α2, and α3 domains of eleven mature MHC-H polypeptide sequences without all, or substantially all, of their leader, transmembrane and intracellular domain regions. The aligned sequences include human HLA-A*0101, SEQ ID NO:24 (see also SEQ ID NO:18); HLA-B*0702, SEQ ID NO:25; HLA-C, SEQ ID NO:26; HLA-A*0201, SEQ ID NO:27; a mouse H2K protein sequence, SEQ ID NO: 28; three variants of HLA-A (var. 2, var. 2C [having Y84C and A139C substitutions], and var. 2CP), SEQ ID NOs: 29-31; 3 human HLA-A molecules (HLA-A*1101 (HLA-A11), SEQ ID NO:32; HLA-A*2402 (HLA-A24), SEQ ID NO: 33; and HLA-A*3303 (HLA-A33), SEQ ID NO:34). HLA-A*0201 is a variant of HLA-A. The Y84A and A236C variant of HLA-A is marked as HLA-A (var. 2). The seventh HLA-A sequence, marked as HLA-A (var. 2C), shows HLA-A substituted with C residues at positions 84, 139 and 236, and the eighth sequence adds one additional proline to the C-terminus of the preceding sequence. The ninth through the eleventh sequences are from HLA-A11 (HLA-A*1101); HLA-A24 (HLA-A*2402); and HLA-A33 (HLA-A*3303), respectively, which are prevalent in certain Asian populations. Indicated in the alignment are the locations (84 and 139 of the mature proteins) where cysteine residues may be inserted in place of the aa at that position for the formation of a disulfide bond to stabilize the MHC-H-β2M complex in the absence of a bound peptide epitope. Also shown in the alignment is position 236 (of the mature polypeptide), which may be replaced by a cysteine residue that can form an intrachain disulfide bond with β2M (e.g., at aa 12 of the mature polypeptide forming, for example, an HLA-A*0201 A236C to β2M R12C disulfide bond). An arrow appears above each of those locations and the residues are bolded. The boxes flanking residues 84, 139 and 236 show the groups of five aas on either side of those six sets of five residues, denoted aa clusters 1, 2, 3, 4, 5, and 6 (shown in the figure as aac1 through aac6, respectively), that may be replaced by 1 to 5 aas selected independently from (i) any naturally occurring aa or (ii) any naturally occurring aa except proline or glycine.

[0033] FIGS. 3E-3G provide alignments of the aa sequences of all, or substantially all, of the α1, α2, and α3 domains of several mature HLA-A, -B, and -C class I heavy chains, respectively. The sequences are provided for a portion of the mature proteins (without all or substantially all of their leader sequences, transmembrane domains or intracellular domains). As described in FIG. 3D, the positions of aa residues 84, 139, and 236 and their flanking residues (aac1 to aac6) that may be replaced by 1 to 5 aas selected independently from (i) any naturally occurring aa or (ii) any naturally occurring aa except proline or glycine are also shown. A consensus sequence is also provided for each group of HLA alleles provided in the figures showing the variable aa positions as “X” residues sequentially numbered and the locations of aas 84, 139 and 236 double underlined.

[0034] FIG. 3H provides a consensus sequence for all, or substantially all, of the α1, α2, and α3 domains of each of HLA-E, -F, and -G polypeptides with the variable aa positions indicated as “X” residues sequentially numbered and the locations of aas 84, 139 and 236 double underlined.

[0035] FIG. 3I provides an alignment of the consensus aa sequences for HLA-A, -B, -C, -E, -F, and -G, which are given in FIGS. 3E to 3H (SEQ ID NOs: 39, 47, and 57-60). The alignment shows the correspondence of aas between the different sequences. Variable residues in each sequence are listed as “X” with the sequential numbering removed. The permissible aas at each variable residue can be determined by reference to FIGS. 3E-3H. As indicated in FIG. 3D, the locations of aas 84, 139 and 236 with their flanking five-aa clusters that may be replaced by 1 to 5 aas selected independently from (i) any naturally occurring aa or (ii) any naturally occurring aa except proline or glycine are also shown.

[0036] FIG. 4 provides a multiple aa sequence alignment of β2M precursors (i.e., including the leader sequence) from Homo sapiens (NP_004039.1; SEQ ID NO:61), Pan troglodytes (NP_001009066.1; SEQ ID NO:62), Macaca mulatta (NP_001040602.1; SEQ ID NO:63), Bos taurus (NP_776318.1; SEQ ID NO:64) and Mus musculus (NP_033865.2; SEQ ID NO:65). Underlined aas 1-20 are the signal peptide (sometime referred to as a leader sequence). The mature β2M sequences starts at aa 21.

[0037] FIG. 5 provides six unconjugated T-Cell-MP embodiments (structures) marked as A through F. In each case the T-Cell-MPs comprise: at least one MOD polypeptide sequence; a core structure that comprises the elements, in the N-terminal to C-terminal direction: a β2M polypeptide sequence, a Class I MHC-H polypeptide sequence comprising MHC-H α1, α2, and α3 domain sequences; and a scaffold polypeptide sequence (e.g., an Ig Fc polypeptide sequence). In the embodiments shown the α1 and α2 polypeptide sequences are linked by an intra-peptide bond between cysteines substituted, for example, with Tyr 84 and Ala 139 (Y84C and A139C substitutions). One or more MODs are located at the amino and/or carboxyl side of the core structure. Optional linker polypeptides that are selected independently, denoted as L1 to L6, are indicated by the line segments. The optional linker polypeptides may appear at either the ends of the T-Cell-MP polypeptide or joining the indicated polypeptide sequences. While the chemical conjugation site for coupling the epitope (epitope presenting molecule) can be located at any suitable location on the T-Cell-MP, potential locations in the β2M polypeptide sequence and the MHC-H polypeptide sequence for the chemical conjugation sites are indicated by asterisks. Although not shown, chemical conjugation sites may also be located in the L3 linker joining the β2M polypeptide sequence and MHC-H polypeptide sequence.

[0038] FIG. 6 provides six embodiments of unconjugated T-Cell-MPs, marked as A through F, that parallel the embodiments in FIG. 5. In the embodiments shown, the chemical conjugation site for coupling an epitope (marked by an asterisk “*”) is indicated as being present in the β2M polypeptide sequence (e.g., comprising an E44C substitution) and the scaffold is an Ig Fc region, which may be interspecific, thereby permitting two different unconjugated T-Cell-MPs to specifically combine to form a heteroduplex. The conjugation site may be in the MHC-H chain (not shown).

[0039] FIG. 7 provides examples of unconjugated T-Cell-MPs having different MOD substitutions (e.g., tandem IL-2 MODs in structure A). The chemical conjugation site for coupling an epitope (marked by an asterisk “*”) is indicated as being present in the β2M polypeptide sequence (e.g., an E44C substitution); however, the chemical conjugation site could be in the MHC-H polypeptide (the α1, α2, and α3 sequence), or in the linker joining the β2M and MHC polypeptides (not shown). The Fc scaffold may be replaced by any other scaffold sequence such as an interspecific Fc polypeptide sequence that can form a heterodimer with its counterpart sequence, and the specific linkers listed are only exemplary and may be replaced by other linker polypeptide sequences.

[0040] FIG. 8 shows some schematics of epitopes having a maleimide group appended for conjugation to a free nucleophile (e.g., cysteine) present in a T-Cell-MP to form an epitope conjugate. In “a” the maleimide group is attached by an optional linker (e.g., a peptide linker sequence) to the epitope. In “b”-“e,” the linker is a glycine serine polypeptide GGGGS (SEQ ID NO:130) repeated n times, where n is 1-5 when present, and n is 0 when the linker is absent. In “c”-“e” the attachment of a maleimide group is through a lysine (K) on the end of a GGGGS (SEQ ID NO: 130) containing linker, such as through the epsilon amino group of the lysine. In “d” and “e” the maleimide group is linked to the peptide through an alkyl amide formed with the epsilon amino group of a lysine (K) residue, where m is 1-7.

[0041] FIG. 9 depicts the formation of a conjugated T-Cell-MP homoduplex from an unconjugated T-Cell-MP having a scaffold (in this case an Ig Fc scaffold) shown at (A). The conjugated T-Cell-MP polypeptide from (A) forms a homoduplex as shown in (B) via interactions between the scaffold sequences. The unconjugated homoduplex may be isolated from cells stably or transiently expressing the T-Cell-MP protein. The unconjugated homoduplex, generally in a purified form, is subjected to chemical conjugation by coupling an epitope to the conjugation sites, which is exemplified by the reaction between a cysteine in the β2M polypeptide sequence (e.g., comprising an E44C substitution) and a maleimide labeled peptide to yield the T-Cell-MP-epitope conjugate shown in (C). Excess reactive peptide can be removed or substoichiometric amounts of the reactive epitope (relative to the amount of conjugation sites) can be utilized to produce the conjugated T-Cell-MP homoduplex. The constructs are not limited to the linker sequences shown, which are exemplary of the linkers that may be employed.

[0042] FIG. 10 depicts the formation of a conjugated T-Cell-MP heteroduplex from unconjugated T-Cell-MPs having scaffolds that selectively form heteroduplexes (in this case interspecific knob-in-hole Ig Fc scaffolds) shown at (A). The conjugated T-Cell-MP polypeptides form a heteroduplex as shown in (B) via interactions between the interspecific scaffold sequences. The unconjugated heteroduplex may be isolated from cells stably or transiently expressing the protein. The unconjugated heteroduplex, generally in a purified form, is subjected to chemical conjugation by coupling an epitope to the conjugation sites, which is exemplified by the reaction between a cysteine in the β2M polypeptide sequence (e.g., an E44C substitution) and a maleimide labeled peptide to yield the T-Cell-MP-epitope conjugate shown in (C). Excess reactive peptide can be removed or substoichiometric amounts of the reactive epitope (relative to the amount of conjugation sites) can be utilized to produce the conjugated T-Cell-MP heteroduplex, which as shown may comprise different MODs on each of the T-Cell-MP polypeptides. The constructs are not limited to the linker sequences shown, which are exemplary of the linkers that may be employed.

[0043] FIG. 11 shows three heterodimeric T-Cell-MP-epitope conjugate duplexes. Each has a scaffold comprising an interspecific Ig Fc polypeptide pair; however, the scaffold polypeptides may be replaced by any other interspecific polypeptide pair. The constructs are not limited to the linker sequences shown, which are exemplary of the linkers that may be employed.

[0044] FIG. 12 shows comparative results for the expression of a series of molecules including T-Cell-MPs in cultured CHO cells, described in Example 1, with the molecules (constructs) having varied substitutions in the L3 linker and at other locations. The overall structure of the molecules is provided at A, B, and C. The titer (amount of protein) of the molecules and fraction of the molecules that are unaggregated (e.g., existing as soluble duplexes) are provided in histograms D and E respectively.

[0045] FIG. 13 shows the production and stability in culture of an unconjugated T-Cell-MP (construct 3861, which has an L3 linker consisting of a Gly₄Ser repeated three times) at 2, 4, and 6 million cells per ml at both 32 and 28° over several days (A and B). The chromatograms show protein A purified material from a culture before (C) and after (D) further purification by size exclusion chromatography. The coomassie blue gel (E) shows that materials run against molecular weight standards (Mw) at 103128 Daltons for reduced (R) and 206213 Daltons for non-reduced samples. See Example 2 for details.

[0046] FIG. 14 at A demonstrates the specificity of the T-Cell-MP-epitope conjugates for T cells specific to the conjugated epitope. At B, FIG. 14 shows an electrophoresis gel of non-reduced and reduced samples of epitope conjugates. See Example 3 for details.

[0047] FIG. 15 and FIG. 16 show the response of CD8+ T cells present in Leukopak samples from CMV and MART-1 response donors to T-Cell-MP-epitope conjugates and control treatments as described in Example 4.

[0048] FIG. 17 shows the effect of L3 linker length on the CHO cell expression of two series of unconjugated T-Cell-MPs, providing the titer in culture media by Octet analysis at A, and the fraction of unaggregated (duplex) molecules present in the samples at B following purification on protein A magnetic beads.

[0049] FIG. 18 depicts methods of directing T cells (e.g., CD 8+ cytotoxic T-cells) specific for the epitope (unfilled triangles) presented by a T-Cell-MP to a target cell (e.g., a cancer cell labeled “Cancer Cell”) using one or two a targeting sequences (e.g., cancer targeting polypeptide or “CTP” as shown) and directing the T cell's cytotoxic response to the target cell. The target cell may also be a cell of a benign neoplasm, precancerous neoplasm, or a coronavirus infected cell, in which case the targeting sequence(s) would be directed to one or two distinct antigens present on those cells. In FIG. 18 each targeting peptide (CTP) is located at the C-terminus of the T-Cell-MP.

[0050] FIG. 19 provides the amino acid sequences of certain constructs discussed in this disclosure. Linker sequences (e.g., AAAGG SEQ ID NO: 132 and GGGGS SEQ ID NO: 130) may be bolded, italicized, and underlined to permit their identification. The indicated single amino acid substitutions in the MHC class I heavy chain are shown in bold with underlining. Human IL2 sequences are indicated by hIL2, beta-2-microglobin sequences are indicated by β2M, and HLA-A*02:01 sequences are indicated by HLA-A02, with each bearing the indicated aa substitutions.

[0051] FIG. 20A to FIG. 20J provide aa sequences of COVID-19 (SARS-CoV-2) proteins/polypeptides, including some derived from the polyprotein of open reading frame 1ab (ORF 1ab) set forth in NCBI Reference Sequence: NC_045512.2. FIG. 20J shows the surface glycoprotein (spike protein) sequences from the Wuhan-Hu-1 strain at (A) (see also Ref. Seq. YP_009724389.1), a delta strain at (B), and an omicron strain at (C). All changes in bold and larger font size with insertions underlined. The numbering of the delta and omicron strain spike protein in FIG. 20J at (B) and (C) have been maintained relative to the Wuhan strain in (A) for ease of reference even though insertions and deletions may have altered the actual positions.

[0052] FIG. 21 provides a table of predicted coronavirus epitopes (SARS-CoV and SARS-CoV-2), indicating for each their respective HLA restriction(s); adapted from Grifoni et al., Cell Host & Microbe 27:1-10 (2020); available on the world wide web (www) at doi.org/10.1016/j.chom.2020.03.002. Abbreviations: surface glycoprotein, S; membrane glycoprotein, MG; nucleocapsid phosphoprotein, NCPP; open reading frame, ORF; protein, Pro.

[0053] FIG. 22 provides a table of epitopes from SARS-CoV-2 proteins (S, surface glycoprotein; M, membrane protein; N, nucleocapsid phosphoprotein, ORF 1ab polyprotein) indicating for each their respective HLA restriction(s); adapted from Grifoni et al., Cell Host & Microbe 29(4):1076-1092 (2021); available on the www at doi.org/10.1016/j.chom.2021.05.010.

[0054] FIG. 23 illustrates the ability of a T-cell-MP-coronavirus epitope conjugate to promote the coronavirus epitope-specific proliferation of T cells within a pool of PBMC from individuals vaccinated with Moderna (MRRNA), Pfizer (PFE), or Johnson & Johnson (JNJ) vaccines.

### V. DEFINITIONS

[0055] The term T-Cell-MP is generic to, and includes, both unconjugated T-Cell-MPs and T-Cell-MP-epitope conjugates. The term “unconjugated T-Cell-MP (or “MPs” when plural) refers to T-Cell-MPs that have not been conjugated (covalently linked) to an epitope and/or payload (e.g., a non-epitope molecule such as a label), and therefore comprise at least one chemical conjugation site. Unconjugated T-Cell-MP polypeptides also do not comprise a fused peptide epitope that can be positioned within the MHC-H binding cleft and in conjunction with the β2M polypeptide sequence be presented to a TCR. The terms “T-Cell-MP-epitope conjugate” (or “conjugates” when plural) refers to T-Cell-MPs that have been conjugated (covalently linked) to an epitope at a chemical conjugation site that permits the covalently linked epitope to be present in the MHC binding cleft and presented to a TCR with specificity for the epitope expressed on a T Cell (an epitope-specific T cell). The term “T-Cell-MP-epitope conjugate(s)” includes higher order complexes such as duplexes unless stated otherwise. Where the T-Cell-MP-epitope conjugate comprises a conjugated coronavirus epitope it may be denoted as a “T-Cell-MP-coronavirus epitope conjugate”, which includes its higher order complexes such as duplexes. Throughout the disclosure where higher order complexes such as duplexes are called out in addition to, for example, a T-Cell-MP-coronavirus epitope conjugate, it is done for antecedent basis and/or emphasis.

[0056] T-Cell-MPs, unconjugated T-Cell-MPs, and T-Cell-MP-epitope conjugates may comprise one or more independently selected MODs or may be MOD-less. In those instances where this disclosure specifically refers to a T-Cell-MP that does not contain a MOD, terms such as “MOD-less T-Cell-MP” or a “T-Cell-MP without a MOD” and the like are employed. The term “T-Cell-MP” also includes unconjugated T-Cell-MPs and T-Cell-MP-epitope conjugates that comprise either one or more independently selected targeting sequences (discussed below).

[0057] “T-Cell-MP-payload conjugate” and “T-Cell-MP-payload conjugates” refer to T-Cell-MPs that have been conjugated (covalently linked) to one or more independently selected payloads. A T-Cell-MP can conjugated to both an epitope and payload to form a T-Cell-MP-epitope and payload conjugate.

[0058] The terms “polynucleotide” and “nucleic acid,” used interchangeably herein, refer to a polymeric form of nucleotides of any length, either ribonucleotides or deoxyribonucleotides. Thus, these terms include, but are not limited to, single-, double-, or multi-stranded DNA or RNA, genomic DNA, cDNA, DNA-RNA hybrids, or a polymer comprising purine and pyrimidine bases or other natural, chemically or biochemically modified, non-natural, or derivatized nucleotide bases.

[0059] The terms “polypeptide,” and “protein” are used interchangeably herein, and refer to a polymeric form of amino acids, which unless stated otherwise are the naturally occurring proteinogenic L-amino acids that are incorporated biosynthetically into proteins during translation in a mammalian cell. Furthermore, as used herein, a “polypeptide” and “protein” include modifications, such as deletions, additions, and substitutions (generally conservative in nature as would be known to a person in the art) to the native sequence, as long as the protein maintains the desired activity. These modifications can be deliberate, as through site-directed mutagenesis, or can be accidental, such as through mutations of hosts that produce the proteins, or errors due to polymerase chain reaction (PCR) amplification or other recombinant DNA methods. References to a specific residue or residue number in a known polypeptide, e.g., position 72 or 75 of MHC polypeptide, are understood to refer to the amino acid at that position in the wild-type polypeptide (i.e. I72 or K75). To the extent that the sequence of the wild-type polypeptide is altered, either by addition or deletion of one or more amino acids, the specific residue or residue number will refer to the same specific amino acid in the altered polypeptide (e.g., in the addition of one amino acid at the N-terminus of a peptide reference as position I72, will be understood to indicate the amino acid, Ile, that is now position 73). Substitution of an amino acid at a specific position is denoted by an abbreviation comprising, in order, the original amino acid, the position number, and the substituted amino acid, e.g., substituting the Ile at position 72 with a cysteine is denoted as I72C.

[0060] A nucleic acid or polypeptide has a certain percent “sequence identity” to another nucleic acid or polypeptide, meaning that, when aligned, that percentage of bases or amino acids are the same, and in the same relative position, when comparing the two sequences. Unless stated otherwise, to determine sequence identity the sequences are aligned using the computer program BLAST (BLAST+2.10.0 using default parameters), which is available over the World Wide Web at sites including blast.ncbi.nlm.nih.gov/Blast.cgi for BLAST+2.10.0. Unless stated otherwise, for determining positions of corresponding amino acids, sequence comparisons are conducted using Clustal Omega Version 1.2.2 (using default parameters) available at on the World Wide Web at www.ebi.ac.uk/Tools/msa/clustalo/.

[0061] As used herein amino acid (“aa” singular or “aas” plural) means the naturally occurring proteinogenic amino acids incorporated into polypeptides and proteins in mammalian cell translation. Unless stated otherwise, these are: L (Leu, leucine), A (Ala, alanine), G (Gly, glycine), S (Ser, serine), V (Val, valine), F (Phe, phenylalanine), Y (Tyr, tyrosine), H (His, histidine), R (Arg, arginine), N (Asn, asparagine), E (Glu, glutamic acid), D (Asp, aspartic acid), C (Cys, cysteine), Q (Gln, glutamine), I (Ile, isoleucine), M (Met, methionine), P (Pro, proline), T (Thr, threonine), K (Lys, lysine), and W (Trp, tryptophan). Amino acid also includes the amino acids, hydroxyproline and selenocysteine, which appear in some proteins found in mammalian cells; however, unless their presence is expressly indicated they are not understood to be included.

[0062] The term “conservative amino acid substitution” refers to the interchangeability in proteins of aa residues having similar side chains. For example, a group of aas having aliphatic side chains consists of glycine, alanine, valine, leucine, and isoleucine; a group of aas having aliphatic-hydroxyl side chains consists of serine and threonine; a group of aas having amide containing side chains consists of asparagine and glutamine; a group of aas having aromatic side chains consists of phenylalanine, tyrosine, and tryptophan; a group of aas having basic side chains consists of lysine, arginine, and histidine; a group of aas having acidic side chains consists of glutamate and aspartate; and a group of aas having sulfur containing side chains consists of cysteine and methionine. Exemplary conservative aa substitution groups are: valine-leucine-isoleucine, phenylalanine-tyrosine, lysine-arginine, alanine-valine-glycine, and asparagine-glutamine.

[0063] As used herein the term “in vivo” refers to any process or procedure occurring inside of the body, e.g., of a patient.

[0064] As used herein, “in vitro” refers to any process or procedure occurring outside of the body.

[0065] The term “binding” (or “bound”) refers generically to a direct association between molecules and/or atoms, due to, for example, covalent, electrostatic, hydrophobic, ionic and/or hydrogen-bond interactions, including interactions such as salt bridges and water bridges.

[0066] The term “binding” (or “bound”) as used with reference to a T-Cell-MP binding to a polypeptide (e.g., a T cell receptor on a T cell) refers to a non-covalent interaction between two molecules. A non-covalent interaction refers to a direct association between two molecules, due to, for example, electrostatic, hydrophobic, ionic, and/or hydrogen-bond interactions, including interactions such as salt bridges and water bridges. Non-covalent binding interactions are generally characterized by a dissociation constant (K_{D}) of less than 10⁻⁶ M, less than 10⁻⁷ M, less than 10⁻⁸ M, less than 10⁻⁹ M, less than 10⁻¹⁰ M, less than 10⁻¹¹ M, less than 10⁻¹² M, less than 10⁻¹³ M, less than 10⁻¹⁴ M, or less than 10⁻¹⁵ M. “Covalent bonding” or “covalent binding” as used herein refers to the formation of one or more covalent chemical bonds between two different molecules.

[0067] “Affinity” as used herein generally refers to the strength of non-covalent binding, increased binding affinity being correlated with a lower K_{D}. As used herein, the term “affinity” may be described by the dissociation constant (K_{D}) for the reversible binding of two agents (e.g., an antibody and an antigen). Affinity can be at least 1-fold greater to at least 1,000-fold greater (e.g., at least 2-fold to at least 5-fold greater, at least 3-fold to at least 6-fold greater, at least 4-fold to at least 8-fold greater, at least 5-fold to at least 10-fold greater, at least 6-fold to at least 15-fold greater, at least 7-fold to at least 20-fold greater, at least 8-fold to at least 30-fold greater, at least 9-fold to at least 35-fold greater, at least 10-fold to at least 40-fold greater, at least 20-fold to at least 60-fold greater, at least 40-fold to at least 80-fold greater, at least 60-fold to at least 180-fold greater, at least 80-fold to at least 240-fold greater, at least 100-fold to at least 1,000-fold greater, or at least 1,000-fold greater) than the affinity of an antibody or receptor for an unrelated aa sequence (e.g., ligand). Affinity of an antibody to a target protein can be, for example, from about 100 nanomolar (nM) to about 0.1 nM, from about 100 nM to about 1 picomolar (pM), or from about 100 nM to about 1 femtomolar (fM) or more. As used herein, the term “avidity” refers to the resistance of a complex of two or more agents to dissociation after dilution.

[0068] The term “immunological synapse” or “immune synapse” as used herein generally refers to the natural interface between two interacting immune cells of an adaptive immune response including, e.g., the interface between an antigen-presenting cell (APC) or target cell and an effector cell, e.g., a lymphocyte, an effector T cell, a natural killer cell, and the like. An immunological synapse between an APC and a T cell is generally initiated by the interaction of a T cell antigen receptor and MHC molecules, e.g., as described in Bromley et al., Ann. Rev. Immunol., 19:375-96 (2001); the disclosure of which is incorporated herein by reference in its entirety.

[0069] “T cell” includes all types of immune cells expressing CD3, including T-helper cells (CD4⁺ cells), cytotoxic T cells (CD8⁺ cells), regulatory T cells (T reg), and NK-T cells.

[0070] The term “immunomodulatory polypeptide” (also referred to as a “costimulatory polypeptide” or, as noted above, a “MOD”) as used herein includes a polypeptide or portion thereof (e.g., an ectodomain) on an APC (e.g., a dendritic cell, a B cell, and the like), or otherwise available to interact with the T cell, that specifically binds a cognate co-immunomodulatory polypeptide (“Co-MOD”) present on a T cell, thereby providing a signal. The signal provided by the MOD engaging its Co-MOD, in addition to the primary signal provided by, for instance, binding of a TCR/CD3 complex with a MHC polypeptide loaded with a peptide epitope, mediates (e.g., directs) a T cell response. The responses include, but are not limited to, proliferation, activation, differentiation, and the like. A MOD can include, but is not limited to, CD7, B7-1 (CD80), B7-2 (CD86), PD-L1, PD-L2, 4-1BBL, OX40L, Fas ligand (FasL), inducible costimulatory ligand (ICOS-L), intercellular adhesion molecule (ICAM), CD30L, CD40, CD70, CD83, HLA-G, lymphotoxin beta receptor, 3/TR6, ILT3, ILT4, HVEM, an agonist or antibody that binds Toll-Like Receptor (TLR), and a ligand that specifically binds with B7-H3. A MOD also encompasses, inter alia, an antibody or antibody fragment that specifically binds with and activates a Co-MOD molecule present on a T cell such as, but not limited, to antibodies against the receptors for any of IL-2, CD27, CD28, 4-1BB, OX40, CD30, CD40, PD-1, ICOS, lymphocyte function-associated antigen-1 (LFA-1), CD2, LIGHT (also known as tumor necrosis factor superfamily member 14 (TNFSF14)), NKG2C, B7-DC, B7-H2, B7-H3, and CD83.

[0071] An immunomodulatory domain of a T-Cell-MP is a polypeptide of the T-Cell-MP or part thereof that acts as a MOD.

[0072] “Recombinant” as used herein means that a particular nucleic acid (DNA or RNA) is the product of various combinations of cloning, restriction, polymerase chain reaction (PCR) and/or ligation steps resulting in a construct having a structural coding or non-coding sequence distinguishable from endogenous nucleic acids found in natural systems. DNA sequences encoding polypeptides can be assembled from cDNA fragments or from a series of synthetic oligonucleotides, to provide a synthetic nucleic acid which is capable of being expressed from a recombinant transcriptional unit contained in a cell or in a cell-free transcription and translation system. The terms “recombinant expression vector” or “DNA construct,” used interchangeably herein, refer to a DNA molecule comprising a vector and at least one insert. Recombinant expression vectors are usually generated for the purpose of expressing and/or propagating the insert(s), or for the construction of other recombinant nucleotide sequences. The insert(s) may or may not be operably linked to a promoter sequence and may or may not be operably linked to DNA regulatory sequences.

[0073] The terms “treatment,” “treating” and the like are used herein to generally mean obtaining a desired pharmacologic and/or physiologic effect. The effect may be prophylactic in terms of completely or partially preventing a disease or symptom thereof and/or may be therapeutic in terms of a partial or complete cure for a disease and/or adverse effect attributable to the disease. “Treatment” as used herein covers any treatment of a disease or symptom in a mammal and includes: (a) preventing the disease or symptom from occurring in a subject which may be predisposed to acquiring the disease or symptom but has not yet been diagnosed as having it; (b) inhibiting the disease or symptom, i.e., arresting its development; and/or (c) relieving the disease, i.e., causing regression of the disease. The therapeutic agent may be administered before, during or after the onset of disease or injury. The treatment of ongoing disease, where the treatment stabilizes or reduces the undesirable clinical symptoms of the patient, is of particular interest. Such treatment is desirably performed prior to complete loss of function in the affected tissues. The subject therapy will desirably be administered during the symptomatic stage of the disease and, in some cases, after the symptomatic stage of the disease.

[0074] The terms “individual,” “subject,” “host,” and “patient” are used interchangeably herein and refer to any mammalian subject for whom diagnosis, treatment, or therapy is desired. Mammals include humans and non-human primates, and in addition include rodents (e.g., rats; mice), lagomorphs (e.g., rabbits), ungulates (e.g., cows, sheep, pigs, horses, goats, and the like), felines, canines, etc.

[0075] Unless indicated otherwise, the term “substantially” is intended to encompass both “wholly” and “largely but not wholly”. For example, an Ig Fc that “substantially does not induce cell lysis” means an Ig Fc that induces no cell lysis at all or that largely but not wholly induces no cell lysis.

[0076] As used herein, the term “about” used in connection with an amount indicates that the amount can vary by 10%. For example, “about 100” means an amount of from 90-110. Where about is used in the context of a range, the “about” used in reference to the lower amount of the range means that the lower amount includes an amount that is 10% lower than the lower amount of the range, and “about” used in reference to the higher amount of the range means that the higher amount includes an amount 10% higher than the higher amount of the range. For example, from about 100 to about 1000 means that the range extends from 90 to 1100.

[0077] Where a range of values is provided, it is understood that each intervening value between the upper and lower limit of that range to a tenth of the lower limit of the range is encompassed within the disclosure along with any other stated or intervening value in the range. Upper and lower limits may independently be included in smaller ranges that are also encompassed within the disclosure subject to any specifically excluded limit in the stated range. Where the stated range has a value (e.g., an upper or lower limit), ranges excluding those values are also included in the invention.

[0078] Unless defined otherwise, all technical and scientific terms used herein have the same meaning as commonly understood by one of ordinary skill in the art to which this invention belongs. Although any methods and materials similar or equivalent to those described herein can also be used in the practice or testing of the present invention, the preferred methods and materials are now described. All publications mentioned herein are incorporated herein by reference to disclose and describe the methods and/or materials in connection with which the publications are cited.

[0079] It must be noted that, as used herein and in the appended claims, the singular forms “a,” “an,” and “the” include plural referents unless the context clearly dictates otherwise. Thus, for example, reference to “a T reg” includes a plurality of such T regs and reference to “the MHC Class I heavy chain” includes reference to one or more MHC Class I heavy chains and equivalents thereof known to those skilled in the art, and so forth. It is further noted that the claims may be drafted to exclude any optional element. As such, this statement is intended to serve as antecedent basis for use of such exclusive terminology as “solely,” “only” and the like in connection with the recitation of claim elements, or use of a “negative” limitation.

[0080] It is appreciated that certain features of the invention, which are, for clarity, described in the context of separate embodiments, may also be provided in combination in a single embodiment. Conversely, various features of the invention, which are, for brevity, described in the context of a single embodiment, may also be provided separately or in any suitable sub-combination. All combinations of the embodiments pertaining to the invention are specifically embraced by the present invention and are disclosed herein just as if each and every combination was individually and explicitly disclosed. In addition, all sub-combinations of the various embodiments and elements thereof are also specifically embraced by the present invention and are disclosed herein just as if each and every such sub-combination was individually and explicitly disclosed herein.

[0081] The publications discussed herein are provided solely for their disclosure prior to the filing date of the present application. Nothing herein is to be construed as an admission that the present invention is not entitled to antedate such publications by virtue of prior invention. Further, the dates of publication provided may be different from the actual publication dates which may need to be independently confirmed.

[0082] Before the present invention is further described, it is to be understood that this invention is not limited to the particular embodiments described, as such may, of course, vary. It is also to be understood that the terminology used herein is for the purpose of describing particular embodiments only, and is not intended to limit the scope of the invention

### VI. DETAILED DESCRIPTION

T Cell Modulatory Polypeptides (T-Cell-MPs) with Chemical Conjugation Sites for Epitope Binding

[0083] The present disclosure includes and provides for T-Cell-MPs (both unconjugated T-Cell-MPs having a chemical conjugation site suitable for attaching an epitope and T-Cell-MP-epitope conjugates to which an epitope has been conjugated). Such T-Cell-MPs are useful for modulating the activity of T cells to, for example, modulate an immune response in vitro, or in vivo, and accordingly to effect therapeutic treatments. The present disclosure specifically provides methods of T-Cell-MP-epitope conjugate preparation and the use of the conjugate in modulating an immune response to a coronavirus in an individual that may be a human or non-human test subject or patient. The human or non-human test subject or patient may be suffering from coronavirus infection or COVID disease or may be positive for coronavirus infection. In addition to the other elements present (e.g., MHC-H, β2M, scaffold etc.), the T-Cell-MPs may comprise one or more independently selected wt. and/or variant MOD polypeptides that exhibit reduced binding affinity to their Co-MODs and one or more payloads.

[0084] Included in this disclosure are T-Cell-MPs that are homodimeric, comprising identical first and second T-Cell-MP polypeptides. Also included in this disclosure are T-Cell-MPs that are heterodimeric, comprising a first and a second T-Cell-MP polypeptide, wherein at least one of those polypeptides comprises a chemical conjugation site for the attachment of an epitope. Optionally at least one of the heterodimers may comprise a payload such as an antiviral agent and/or a targeting sequence. Included in this disclosure are T-Cell-MPs which have been chemically conjugated to an epitope to form a T-Cell-MP-epitope conjugate and which optionally comprise a targeting sequence and/or a payload.

[0085] Depending on the type of MOD(s) present in a T-Cell-MP-epitope conjugate, a T cell bearing a TCR specific to the epitope presented by the T-Cell-MP-epitope conjugate can respond by undergoing activation including, for example, clonal expansion (e.g., when activating MODs such as wt. and/or variants of IL-2, 4-1BBL and/or CD80 that are incorporated into the T-Cell-MP). Activating MODs present in a T-Cell-MP-epitope conjugate may also increase, for example, granule dependent responses by T cells bearing a TCR specific to the epitope presented by the T-Cell-MP-epitope conjugate. Alternatively, the T cell may undergo inhibition that down regulates T cell activity when inhibitory MODs such as wt. and/or variants of FASL and/or PD-L1 are incorporated into the T-Cell-MPs. The incorporation of combinations of MODs such as wt. and/or variants of IL-2 and CD80 or IL2 and PD-L1 into T-Cell-MPs (e.g., T-Cell-MP-epitope conjugates) may lead to synergistic effects where the T cell response more than exceeds the sum of the responses of T cells to otherwise identical T-Cell-MPs lacking one of the MODs. Because MODs are not specific to any epitope, activation or inhibition of T cells can be biased toward epitope-specific interactions by incorporating variant MODs (e.g., MODs having reduced affinity for their Co-MOD) into the T-Cell-MPs such that the binding of a T-Cell-MP to a T cell is strongly affected by, or even dominated by, the MHC-epitope-TCR interaction.

[0086] A T-Cell-MP-epitope conjugate bearing MODs may be considered to function as a surrogate APC and, by interacting with a T-Cell, mimic the presentation of epitope in an adaptive immune response. The T-Cell-MP-epitope conjugate does so by engaging and presenting to a TCR present on the surface of a T cell with a covalently bound epitope (e.g., a peptide presenting an epitope). This engagement provides the T-Cell-MP-epitope conjugate with the ability to achieve epitope-specific cell targeting. In embodiments described herein, T-Cell-MP-epitope conjugates also possess at least one MOD that engages a counterpart costimulatory protein (Co-MOD) on the T cell. Both signals-epitope/MHC binding to a TCR and MOD binding to a Co-MOD-then drive both the desired T cell specificity and either inhibition/apoptosis or activation/proliferation.

[0087] Unconjugated T-Cell-MPs, which have chemical conjugation sites, find use as a platform into which different epitopes may be introduced, either alone or in combination with one or more additional payloads added to the T-Cell-MP, in order to prepare materials for therapeutic, diagnostic and research applications. Because T-Cell-MPs, including duplexes comprised of homodimers, and higher order homomeric complexes require only a single polypeptide sequence, they can advantageously be introduced and expressed by cells using a single vector with a single expression cassette. Similarly, heterodimeric duplex T-Cell-MPs can be introduced into cells using a single vector with two separate expression cassettes or a bicistronic expression cassette (e.g. with the proteins separated by a 2A protein sequence or internal ribosome entry sequence (IRES)), or by using two vectors each bearing a cassette coding one heterodimeric subunit. Where duplex or higher order T-Cell-MPs contain interspecific scaffold sequences, the different T-Cell-MPs may bear different MODs permitting the duplex or higher order structure to contain different MODs, or MODs at different locations on each polypeptide of the heterodimer. The modular nature of T-Cell-MPs enables the rapid preparation and testing of diagnostic and therapeutic candidates for coronavirus treatments by coupling an epitope containing molecule (e.g., a peptide) into prepared T-Cell-MP polypeptides that can then be tested for activation or inhibition of T cells bearing TCRs specific to the coronavirus epitope. The ability to construct unconjugated T-Cell-MPs, and in particular heterodimer T-Cell-MP duplexes with different MODs, permits rapid assembly and assessment of different combinations of MODs with one or more epitope relevant to coronavirus disease or infection. Further to the foregoing, the ability to rapidly attach and access the effectiveness of various payloads, such as antiviral agents, and/or targeting sequences, to the T-Cell-MP facilitates preparation of T-Cell-MPs both for screening and as therapeutics for coronavirus. In some instances, a chemical conjugation site of a T-Cell-MP other than the conjugation site utilized for the attachment of the epitope may be utilized to attach a payload such as an antiviral agent to the T-Cell-MP, or a targeting sequence (e.g. a polypeptide comprising a targeting sequence) such as a cancer-targeting sequence.

[0088] Where one or more activating wt. MOD or variant MOD polypeptide sequences are incorporated into a T-Cell-MP-epitope conjugate, contacting the T cells with a TCR specific to the epitope with at least one concentration of the T-Cell-MP-epitope conjugate can result in T cell activation. T cell activation may result in one or more of the following: an increase in the activity of ZAP-70 protein kinase activity, induction in the proliferation of the T-cell(s), granule-dependent effector actions (e.g., the release of granzymes, perforin, and/or granulysin from cytotoxic T-cells), and/or release of T cell cytokines (e.g., interferon γ from CD8+ cells). Where the MOD polypeptide sequence(s) induces T cell proliferation, the T-Cell-MP-epitope conjugate may induce at least a twofold (e.g., at least a 2, 3, 4, 5, 10, 20, 30, 50, 75, or 100 fold) difference in the activation of T cells having a TCR specific to the epitope as compared to T cells contacted with the same concentration of the T-Cell-MP-epitope conjugate that do not have a TCR specific to the epitope (see FIG. 1). Activation of T-cells may be measured by, for example, ZAP-70 activity or T cell proliferation (see, e.g., Wang, et al., Cold Spring Harbor perspectives in biology 2.5 (2010): a002279), or cytokine release. Where one or more wt. or variant MOD polypeptide sequences that inhibit T cell activation are incorporated into a T-Cell-MP-epitope conjugate, contacting the T cells having a TCR specific to the epitope with at least one concentration of the T-Cell-MP-epitope conjugate may result in one or more of the following: prevention or inhibition of the T cell's activation, reduction in the response of activated T cells, and/or down regulation of the epitope-specific T-Cell. In some cases, inhibitory MODs present in a T-Cell-MP-epitope conjugate may result in apoptosis of T cell(s) with a TCR specific to the epitope. The effects of inhibitory MOD sequences may be measured by, for example, one or more of their: effect on T cell proliferation, ZAP-70 activity, reduction in granule-dependent effector actions, and/or cell death.

[0089] Where variant MODs that inhibit T cell activation and a peptide presenting a coronavirus epitope are incorporated into a T-Cell-MP, contacting the T-cells with at least one concentration of the T-Cell-MP-coronavirus epitope conjugate prevents activation of T-cells in an epitope-specific manner as measured by, for example, T cell proliferation (inhibition of proliferation) or the inhibition of granule dependent of independent responses. Such molecules may be used, for example, where a patient is experiencing a cytokine storm in response to a coronavirus infection.

[0090] The specificity of T-Cell-MP-epitope conjugates depends on the relative contributions of the epitope and the MODs to the binding. Where the affinity of the MOD(s) for the Co-MOD(s) is relatively high such that the MOD(s) dominate the T-Cell-MPs in the binding interactions, the specificity of the T-Cell-MP-epitope conjugates will be reduced relative to T-Cell-MP complexes where the epitope dominates the binding interactions by contributing more to the overall binding energy than the MODs. The greater the contribution of binding energy between an epitope and a TCR specific to the epitope, the greater the specificity of the T-Cell-MP will be for the T cell bearing that type of TCR. Where an epitope MHC complex has strong affinity for its TCR, the use of wt. MODs that have relatively low affinity and/or variant MODs with reduced affinity for their Co-MODs will favor epitope selective interactions of the T-Cell-MP-epitope conjugates with specific T cells, and also facilitate selective delivery of any payload that may be conjugated to the T-Cell-MP-epitope conjugate to the T cell and/or locations where the T cell is located.

[0091] Accordingly, the present disclosure provides T-Cell-MP-epitope conjugates presenting coronavirus epitopes that are useful for modulating the activity of T-cells in an epitope-specific manner and, accordingly, for modulating an immune response to coronaviruses (e.g., SARS-CoV or SARS-CoV-2) in an individual. Such T-Cell-MPs may comprise one or more MODs that are either wt. and/or variants (e.g., variants that exhibit reduced binding affinity to a Co-MOD).

### A. Unconjugated T-Cell-MPs and T-Cell-MP-Epitope Conjugates

### 1 The Structure and Composition of Unconjugated T-Cell-MPs and T-Cell-MP-Epitope Conjugate Components

[0092] The unconjugated T-Cell-MPs described herein comprise a chemical conjugation site for coupling an epitope directly, or indirectly through a linker. The chemical conjugation site can be situated at any location on the T-Cell-MP. One aspect of the disclosure is directed to T-Cell-MPs that comprise a chemical conjugation site for the attachment of a peptide epitope within the scaffold (e.g., Ig Fc), β2M, or MHC-H polypeptide sequences, or within the linker (L3) joining the β2M and MHC-H polypeptide sequences, and higher order complexes of those T-Cell-MPs. Another aspect of the disclosure is directed to T-Cell-MPs that comprise a chemical conjugation site for the attachment of a peptide epitope within the β2M, or MHC-H polypeptide sequences, or within the linker (L3) joining the β2M and MHC-H polypeptide sequences, and higher order complexes of those T-Cell-MPs. A chemical conjugation site for coupling an epitope directly, or indirectly through a linker, can be situated in the β2M polypeptide sequence. A chemical conjugation site for coupling an epitope directly, or indirectly through a linker, can be situated in the MHC-H polypeptide sequence. A chemical conjugation site for coupling an epitope directly, or indirectly through a linker, can be situated in the linker (L3) joining the β2M polypeptide sequence and MHC-H polypeptide sequence. A chemical conjugation site for coupling an epitope directly, or indirectly through a linker, can be situated within the scaffold (e.g., Ig Fc). Where a chemical conjugation site for coupling an epitope to an unconjugated T-Cell-MP appears in a scaffold (e.g., an Ig Fc), β2M, or MHC-H polypeptide sequence, the chemical conjugation site may be limited to an amino acid or sequence of amino acids not naturally appearing in any of those sequences, and may involve one or more amino acids introduced into one of those sequences (e.g., one or more aas introduced into an aa sequence position at which the one or more aas do not appear in the naturally occurring sequence). In addition, while it is possible to utilize the N-terminal amino group or C-terminal carboxyl group of a T-Cell-MP polypeptide as a chemical conjugation site for epitope attachment, those sites may be excluded as conjugation sites from any of the T-Cell-MPs or their higher order complexes described herein. Indeed, the chemical conjugation site of a T-Cell-MP may be excluded from the N-terminal 10 or 20 aas and/or the C-terminal 10 or 20 aas.

[0093] T-Cell-MPs may form higher order complexes (e.g., duplexes, triplexes, etc.). The higher order complexes may be duplexes that are homomeric (e.g., homodimers or homoduplexes) or heteromeric (e.g., heterodimers or heteroduplexes). Pairs of interspecific sequences may be employed as scaffold sequences where the complexes are intended to be heterodimeric as they permit two different T-Cell-MPs to form a specific heteroduplex, as opposed to a mixture of homoduplexes and heteroduplexes that can form if two T-Cell-MPs not having a pair of interspecific binding sequences are mixed (e.g., co-expressed).

[0094] A first group of T-Cell-MP molecules described herein is broadly directed to T-Cell-MPs that may form a duplex that associates through interactions in their scaffold sequences. Such T-Cell-MPs may have at least a first T-Cell-MP polypeptide sequence (e.g., duplexed as a homodimer), or non-identical first and second T-Cell-MP polypeptide sequences (e.g., duplexed as a heterodimer), with one or both of the T-Cell-MPs comprising (e.g., from N-terminus to C-terminus):
[0095] (i) optionally one or more MOD polypeptide sequences (e.g., two or more MOD polypeptide sequences, such as in tandem, wherein when there are two or more MOD polypeptide sequences they are optionally joined to each other by independently selected L1 linkers);
[0096] (ii) an optional L2 linker polypeptide sequence joining the one or more MOD polypeptide sequences to a β2M polypeptide sequence;
[0097] (iii) the β2M polypeptide sequence;
[0098] (iv) an optional L3 linker polypeptide sequence (e.g., from 10-50 aa in length);
[0099] (v) a class I MHC-H polypeptide sequence;
[0100] (vi) an optional L4 linker polypeptide sequence;
[0101] (vii) a scaffold polypeptide sequence (e.g., an Ig Fc sequence);
[0102] (viii) an optional L5 linker polypeptide sequence; and
[0103] (ix) optionally one or more MOD polypeptide sequence (e.g., two or more MOD polypeptide sequences, such as in tandem, wherein when there are two or more MOD polypeptide sequences they are optionally joined to each other by independently selected L6 linkers);
[0104] wherein the unconjugated T-Cell-MP comprises at least one MOD polypeptide sequence (e.g., the MOD(s) of element (i) and/or (ix)); and
[0105] wherein at least one of the β2M polypeptide sequence, the L3 linker polypeptide sequence, and/or the MHC-H polypeptide sequence comprises at least one chemical conjugation site.

[0106] A second group of unconjugated T-Cell-MPs described herein may form a duplex between a first T-Cell-MP and a second T-Cell-MP that associate through interactions in their scaffold sequences. Such unconjugated duplex T-Cell-MPs may have an identical first and second T-Cell-MP polypeptide sequence duplexed as a homodimer, or non-identical first and second T-Cell-MP polypeptide sequences duplexed as a heterodimer, with one or both of the T-Cell-MPs comprising from N-terminus to C-terminus:
[0107] (i) optionally one or more MOD polypeptide sequences (e.g., two or more MOD polypeptide sequences, such as in tandem, wherein when there are two or more MOD polypeptide sequences they are optionally joined to each other by independently selected L1 linkers);
[0108] (ii) an optional L2 linker polypeptide sequence joining the one or more optional MOD polypeptide sequences to a β2M polypeptide sequence;
[0109] (iii) the β2M polypeptide sequence;
[0110] (iv) an optional L3 linker polypeptide sequence (e.g., from 10-50 aa in length);
[0111] (v) a class I MHC-H polypeptide sequence;
[0112] (vi) an optional L4 linker polypeptide sequence;
[0113] (vii) a scaffold polypeptide sequence (e.g., an Ig Fc sequence);
[0114] (viii) an optional L5 linker polypeptide sequence; and
[0115] (ix) optionally one or more MOD polypeptide sequence (e.g., two or more MOD polypeptide sequences, such as in tandem, wherein when there are two or more MOD polypeptide sequences they are optionally joined to each other by independently selected L6 linkers);
[0116] wherein the unconjugated T cell modulatory polypeptide comprises at least one MOD polypeptide sequence (e.g., the MOD(s) of element (i) and/or (ix)); and
[0117] wherein at least one of the β2M polypeptide sequence, the L3 linker polypeptide sequence, and/or the MHC-H polypeptide sequence comprises at least one chemical conjugation site, e.g., for epitope conjugation and/or payload conjugation.

[0118] A third group of unconjugated T-Cell-MPs described herein appears as a duplex between a first T-Cell-MP and a second T-Cell-MP that associate through interactions in their scaffold sequences. Such unconjugated duplex T-Cell-MPs may have an identical first and second T-Cell-MP polypeptide sequence duplexed as a homodimer, or non-identical first and second T-Cell-MP polypeptide sequences duplexed as a heterodimer, with one or both of the T-Cell-MPs comprising from N-terminus to C-terminus:
[0119] (i) optionally one or more MOD polypeptide sequences (e.g., two or more MOD polypeptide sequences, such as in tandem, wherein when there are two or more MOD polypeptide sequences they are optionally joined to each other by independently selected L1 linkers);
[0120] (ii) an optional L2 polypeptide sequence joining the one or more optional MOD polypeptide sequences to a β2M polypeptide sequence;
[0121] (iii) the β2M polypeptide sequence;
[0122] (iv) an L3 linker polypeptide sequence comprising from 10 to 50 amino acids;
[0123] (v) a class I MHC-H polypeptide sequence comprising cysteines substituted at positions 84 and 139 (see FIGS. 3E-3H, e.g., Y84C and A139C substitutions) and forming a disulfide bond;
[0124] (vi) an L4 linker polypeptide sequence;
[0125] (vii) an interspecific or non-interspecific Ig Fc scaffold sequence;
[0126] (viii) an L5 linker polypeptide sequence; and
[0127] (ix) optionally one or more MOD polypeptide sequence (e.g., two or more MOD polypeptide sequences, such as in tandem, wherein when there are two or more MOD polypeptide sequences they are optionally joined to each other by independently selected L6 linkers);
[0128] wherein at least one of the β2M polypeptide sequence, the L3 linker polypeptide sequence, and/or the MHC-H polypeptide sequence comprises at least one chemical conjugation site, e.g., for epitope conjugation and/or payload conjugation; wherein at least one of the β2M polypeptide sequence, the L3 linker polypeptide sequence, or the MHC-H polypeptide sequence comprises a chemical conjugation site that does not appear in a wt. sequence; and
[0129] wherein the first and second T-Cell-MPs are optionally covalently linked through at least one disulfide bond between their Ig Fc scaffold sequences. The chemical conjugation site should be suitable for epitope conjugation in that it does not interfere with the interactions of the T-Cell-MP with a TCR and is preferably solvent accessible permitting its conjugation to the epitope.

[0130] The chemical conjugation sites for epitope conjugation to T-Cell-MPs, including those of the above-mentioned first, second, and third groups of unconjugated T-Cell-MPs, permit the covalent attachment of a coronavirus (e.g., SARS-CoV or SARS-CoV-2) epitope presenting molecule (e.g., a peptide epitope) to the T-Cell-MP such that it can be bound (located in the binding cleft) by the MHC-H polypeptide and presented to a TCR. The chemical conjugation sites of an unconjugated T-Cell-MP may be one that does not appear in a wt. sequence (e.g., they are created using the techniques of protein engineering based in biochemistry and/or molecular biology). The chemical conjugation site should also be suitable for epitope conjugation in that it does not interfere with the interactions of the T-Cell-MP with a TCR, and is preferably solvent accessible, permitting its conjugation to the epitope.

[0131] It is understood that the unconjugated T-Cell-MPs do not comprise a peptide epitope (either covalently attached to, or as a fusion with, the T-Cell-MP polypeptide) that can be located in the binding cleft of the MHC-H/β2M polypeptide sequences and presented to a TCR. The disclosure does, however, include and provide for T-Cell-MP-epitope conjugates further comprising a molecule presenting an epitope that is directly or indirectly (e.g., through a peptide or non-peptide linker) covalently attached to the T-Cell-MP at a chemical conjugation site; where the epitope can also be associated with (located in or positioned in) the binding cleft of the T-Cell-MP MHC-H polypeptide sequence and functionally presented to a T cell bearing a TCR specific for the epitope, leading to TCR mediated activation or inhibition of the T cell.

[0132] The disclosure also provides T-Cell-MPs in which the epitope present in a T-Cell-MP-epitope conjugate may bind to a TCR (e.g., on a T cell) with an affinity of at least 100 micro molar (μM) (e.g., at least 10 μM, at least 1 μM, at least 100 nM, at least 10 nM, or at least 1 nM).

[0133] A T-Cell-MP-epitope conjugate may bind to a first T cell with an affinity that is higher than the affinity with which the T-Cell-MP-epitope conjugate binds to a second T cell; where the first T cell expresses on its surface a Co-MOD and a TCR that binds the epitope, and where the second T cell expresses on its surface the same Co-MOD present on the first T cell, but does not express on its surface a TCR that binds the epitope (e.g., as tightly as the TCR of the first cell if it binds at all). See FIG. 1. The increased affinity may be measured in binding assays or inferred from the concentration of the T-Cell-MP-epitope conjugate required to stimulate the first as compared to the second T cell. The increased affinity for epitope-specific T cells (i.e., T cells that express a TCR that recognizes and binds the epitope presented by an MHC molecule) permits the use of the T-Cell-MP-epitope conjugates as agents for clinical testing, diagnostics, and as therapeutics capable of directing epitope-specific T cell actions.

[0134] MODs present in T cell-MPs are independently selected wt. MODs and/or variant MODs. Where the T cell-MP forms a heteromeric complex, such as through the use of interspecific scaffold polypeptide sequences, the MODs presented in at least one (e.g., at least two) of the T-Cell-MPs of the heteromer may be selected independently from the other T-Cell-MPs of the heteromeric complex. Accordingly, a heterodimeric duplex T-Cell-MP may have independently selected MODs that are different in the first and second T-Cell-MPs of the duplex. MODs in one aspect are selected to be one or more activating wt. MODs and/or variant MODs capable of stimulating epitope-specific T cell activation/proliferation (e.g., wt. and/or variant IL-2, 4-1BBL and/or CD80). In another embodiment, the MODs are one or more inhibitory wt. MODs and/or variant MODs capable of inhibiting T cell activation/proliferation (e.g., FAS-L and/or PD-L1). When used in conjunction with a T-Cell-MP bearing a suitable epitope, such activating or inhibitory MODs are capable of epitope-specific T cell action, particularly where the MODs are variant MODs and the MHC-epitope-TCR interaction is sufficiently strong to dominate the interaction of the T-Cell-MP with the T cells.

### 2 Chemical Conjugation Sites of Unconjugated T-Cell-MPs

[0135] The term “chemical conjugation site” means any suitable site of a T-Cell-MP that permits the selective formation of a direct or indirect (through an intervening linker or spacer) covalent linkage between the T-Cell-MP and an epitope- or payload-containing molecule. Chemical conjugation sites of unconjugated T-Cell-MPs may be (i) active, i.e., capable of forming a direct or indirect (through an intervening linker or spacer) covalent linkage between the T-Cell-MP and an epitope or payload without an additional chemical reaction or transformation of the chemical conjugation site (e.g., a solvent-accessible cysteine sulfhydryl), or (ii) nascent, i.e., requiring a further chemical reaction or enzymatic transformation of the chemical conjugation site to become an active chemical conjugation site (e.g., a sulfatase sequence not yet activated by an fGly enzyme). Selective formation of a direct or indirect linkage between a T-Cell-MP and an epitope may occur at a side chain functional group of an amino acid in a T-Cell-MP (e.g., linkage to an aa in the β2M polypeptide sequence).

[0136] The term “selective formation” means that when an epitope- or payload-containing molecule bearing a moiety that is reactive with an active chemical conjugation site of a T-Cell-MP, the epitope- or payload-containing molecule will be covalently bound to the chemical conjugation site in an amount higher than to any other site in the T-Cell-MP.

[0137] Chemical conjugation sites may be introduced into a T-Cell-MP using protein engineering techniques (e.g., by use of an appropriate nucleic acid sequence) to achieve a T-Cell-MP having a desired aa sequence. Chemical conjugation sites can be individual aas (e.g., a cysteine or lysine) or aa sequences (e.g., sulfatase, sortase or transglutaminase sequences) in a protein or polypeptide sequence of the T-Cell-MP.

[0138] Where the protein or polypeptide sequence of the T-Cell-MP is derived from a naturally occurring protein (e.g., the β2M, MHC-H or an IgG scaffold), the chemical conjugation site may be a site not appearing in the naturally occurring sequence, such as a site resulting from amino acid substitutions (e.g., cysteine substitutions), insertions, and or deletions. The chemical conjugation site may also be a sequence, or part of a sequence, that is not derived from a naturally occurring protein, such as a linker sequence (e.g., the L3 linker of a T-Cell-MP connecting the β2M and MHC-H polypeptide sequences of a T-Cell-MP).

[0139] In some embodiments, there is only one chemical conjugation site (e.g., one chemical conjugation site added by protein engineering) in each unconjugated T-Cell-MP polypeptide that permits an epitope to be covalently attached such that it can be located in the MHC polypeptide binding cleft and presented to a TCR. Each individual unconjugated T-Cell-MP may comprise more than one chemical conjugation site each selected individually to be either the same or different types of chemical conjugation sites, thereby permitting the same or different molecules (e.g., an epitope and one or more payloads) to be selectively conjugated to each of the chemical conjugation sites. Accordingly, each individual or duplexed unconjugated T-Cell-MP may comprise one or more chemical conjugations sites that are selected to be either the same or different types of chemical conjugation sites, thereby permitting the same or different molecules to be selectively conjugated to each of the chemical conjugation sites. The chemical conjugations sites (e.g., for the conjugation of epitope) generally will be the same (e.g., of the same type) so that epitope presenting molecules can be covalently attached to all of the desired sites in, for example, a duplex unconjugated T-Cell-MP, using a single reaction. T-Cell-MPs may contain chemical conjugation sites in addition to those for the conjugation to an epitope, including conjugation sites for the incorporation of, for example, targeting sequences (e.g., polypeptides comprising a targeting sequence), and/or payloads such as labels.

[0140] Chemical conjugation sites used to incorporate molecules other than epitope presenting molecules will, in most instances, be of a different type (e.g., utilize different chemical reactions) and in different locations than the sites used to incorporate epitopes, thereby permitting different molecules to be selectively conjugated to each of the polypeptides. Where a T-Cell-MP is to comprise a targeting sequence and/or one or more payload molecules, the unconjugated T-Cell-MP may comprise more than one copy of a chemical conjugation site (e.g., chemical conjugation sites added by protein engineering) to permit attachment to multiple molecules of targeting sequence (e.g., as a polypeptides comprising a targeting sequence), and/or payload.

[0141] Chemical conjugation sites that may be incorporated into unconjugated T cell-MP polypeptides, include, but are not limited to:
[0142] a) peptide sequences that act as enzyme modification sequences (e.g., sulfatase, sortase, and/or transglutaminase sequences);
[0143] b) non-natural aas and/or selenocysteines;
[0144] c) chemical conjugation sites comprising individual amino acids;
[0145] d) carbohydrate or oligosaccharide moieties; and
[0146] e) IgG nucleotide binding sites.
   a. Sulfatase Motifs

[0147] In those embodiments where enzymatic modification is chosen as the means of chemical conjugation, the chemical conjugation site(s) may comprise a sulfatase motif. Sulfatase motifs are usually 5 or 6 aas in length, and are described, for example, in U.S. Pat. No. 9,540,438 and U.S. Pat. Pub. No. 2017/0166639 A1, which are incorporated by reference. Insertion of the motif results in the formation of a protein or polypeptide that is sometimes referred to as aldehyde tagged or having an aldehyde tag. The motif may be acted on by formylglycine generating enzyme(s) (“FGE” or “FGEs”) to convert a cysteine or serine in the motif to a formylglycine residue (“fGly” although sometimes denoted “FGly”), which is an aldehyde containing aa, sometimes referred to as oxoalanine, that may be utilized for selective (e.g., site specific) chemical conjugation reactions. Accordingly, as used herein, “aldehyde tag” or “aldehyde tagged” polypeptides refer to an aa sequence comprising an unconverted sulfatase motif, as well as to an aa sequence comprising a sulfatase motif in which the cysteine or the serine residue of the motif has been converted to fGly by action of an FGE. Where the term sulfatase motif is utilized in the context of an aa sequence, both the nascent chemical conjugation sequence (e.g., a polypeptide containing the unconverted motif) as well as its fGly containing the active chemical conjugation site counterpart are disclosed. Once present in a polypeptide (e.g., of a T-Cell-MP), a fGly residue may be reacted with molecules (e.g., peptide epitopes with or without an intervening linker) comprising a variety of reactive groups including, but not limited to, thiosemicarbazide, aminooxy, hydrazide, and hydrazino groups to form a conjugate (e.g., a T-Cell-MP-epitope conjugate) having a covalent bond between the peptide and the molecule via the fGly residue. Sulfatase motifs may be used to incorporate not only epitopes (e.g., epitope presenting peptides), but also targeting sequences (e.g., polypeptides comprising a targeting sequence), and/or payloads (e.g., in the formation of conjugates with drugs and diagnostic molecules).

[0148] In embodiments, the sulfatase motif is at least 5 or 6 aa residues, but can be, for example, from 5 to 16 (e.g., 6-16, 5-14, 6-14, 5-12, 6-12, 5-10, 6-10, 5-8, or 6-8) aas in length. The sulfatase motif may be limited to a length less than 16, 14, 12, 10, or 8 aa residues.

[0149] In an embodiment, the sulfatase motif comprises the sequence of Formula (I): X1Z1X2Z2X3Z3 (SEQ ID NO: 66), where
[0150] Z1 is cysteine or serine;
[0151] Z2 is either a proline or alanine residue (which can also be represented by “P/A”);
[0152] Z3 is a basic aa (arginine, lysine, or histidine, usually lysine), or an aliphatic aa (alanine, glycine, leucine, valine, isoleucine, or proline, usually A, G, L, V, or I);
[0153] X1 is present or absent and, when present, can be any aa, though usually an aliphatic aa, a sulfur-containing aa, or a polar uncharged aa (e.g., other than an aromatic aa or a charged aa), usually L, M, V, S or T, more usually L, M, S or V, with the proviso that, when the sulfatase motif is at the N-terminus of the target polypeptide, X1 is present; and
[0154] X2 and X3 independently can be any aa, though usually an aliphatic aa, a polar, uncharged aa, or a sulfur containing aa (e.g., other than an aromatic aa or a charged aa), usually S, T, A, V, G or C, more usually S, T, A, V or G.

[0155] As indicated above, a sulfatase motif of an aldehyde tag is at least 5 or 6 aa residues, but can be, for example, from 5 to 16 aas in length. The motif can contain additional residues at one or both of the N- and C-termini, such that the aldehyde tag includes both a sulfatase motif and an “auxiliary motif.” In an embodiment, the sulfatase motif includes a C-terminal auxiliary motif (i.e., following the Z3 position of the motif).

[0156] A variety of FGEs may be employed for the conversion (oxidation) of cysteine or serine in a sulfatase motif to fGly. As used herein, the term formylglycine generating enzyme, or FGE, refers to fGly-generating enzymes that catalyze the conversion of a cysteine or serine of a sulfatase motif to fGly. As discussed in U.S. Pat. No. 9,540,438, the literature often uses the term formylglycine-generating enzymes for those enzymes that convert a cysteine of the motif to fGly, whereas enzymes that convert a serine in a sulfatase motif to fGly are referred to as Ats-B-like.

[0157] Sulfatase motifs of Formula (I) amenable to conversion by a prokaryotic FGE often contain a cysteine or serine at Z1 and a proline at Z2 that may be modified either by the “SUMP I-type” FGE or the “Ats-B-like” FGE, respectively. Prokaryotic FGE enzymes that may be employed include the enzymes from Clostridium perfringens (a cysteine type enzyme), Klebsiella pneumoniae (a Serine-type enzyme) or the FGE of Mycobacterium tuberculosis. Where peptides containing a sulfatase motif are being prepared for conversion into fGly-containing peptides by a eukaryotic FGE, for example by expression and conversion of the peptide in a eukaryotic cell or cell-free system using a eukaryotic FGE, sulfatase motifs amenable to conversion by a eukaryotic FGE may advantageously be employed.

[0158] Host cells for production of polypeptides with unconverted sulfatase motifs, or where the cell expresses a suitable FGE for converting fGly-containing polypeptide sequences, include those of a prokaryotic and eukaryotic organism. Non-limiting examples include Escherichia coli strains, Bacillus spp. (e.g., B. subtilis, and the like), yeast or fungi (e.g., S. cerevisiae, Pichia spp., and the like). Examples of other host cells, including those derived from a higher organism such as insects and vertebrates, particularly mammals, include, but are not limited to, Hela cells (e.g., American Type Culture Collection (ATCC) No. CCL-2), CHO cells (e.g., ATCC Nos. CRL9618 and CRL9096), CHO DG44 cells, CHO-KI cells (ATCC CCL-61), 293 cells (e.g., ATCC No. CRL-1573), Vero cells, NIH 3T3 cells (e.g., ATCC No. CRL-1658), Hnh-7 cells, BHK cells (e.g., ATCC No. CCLIO), PC12 cells (ATCC No. CRL1721), COS cells, COS-7 cells (ATCC No. CRL 1651), RAT1 cells, mouse L cells (ATCC No. CCLI.3), human embryonic kidney (HEK) cells (ATCC No. CRL 1573), HLHepG2 cells, and the like.

[0159] Sulfatase motifs may be incorporated into any desired location of a T-Cell-MP (for preparation of a T-Cell-MP-epitope conjugate). In an embodiment they may be excluded from the amino or carboxyl terminal 10 or 20 amino acids. In an embodiment, a sulfatase motif may be added in (e.g., at or near the terminus) of any T-Cell-MP element, including the MHC-H or β2M polypeptide sequences or any linker sequence joining them (the L3 linker). Sulfatase motifs may also be added to the scaffold polypeptide (e.g., the Ig Fc) or any of the linkers present in the T-Cell-MP (e.g., L1 to L6).

[0160] A sulfatase motif may be incorporated into, or attached to (e.g., via a peptide linker), a β2M polypeptide in a T-Cell-MP with a sequence having at least 85% (e.g., at least 90%, 95%, 98% or 99%, or even 100%) aa sequence identity to at least 50 (e.g., at least 60, 70, 80, 90, 96, 97, or 98 or all) contiguous aas of a mature β2M polypeptide sequence shown in FIG. 4 (e.g., the sequences shown in FIG. 4 starting at aa 21 and ending at their C-terminus). The mature human β2M polypeptide sequence in FIG. 4 may be selected for incorporation of the sulfatase motif. Sequence identity to the β2M polypeptides is determined relative to the corresponding portion of a β2M polypeptide in FIG. 4 without consideration of the added sulfatase motif or any linker or other sequences present.

[0161] In an embodiment, a sulfatase motif may be incorporated into a β2M polypeptide sequence having 1 to 15 (e.g., 1, 2, 3, 4, 5, 6, 7, 8, 9, 10, 11, 12, 13, 14, or 15) aa deletions, insertions and/or changes compared with a sequence shown in FIG. 4 (either an entire sequence shown in FIG. 4, or the sequence of a mature polypeptide starting at aa 21 and ending at its C-terminus). Changes are assessed without consideration of the aas of the sulfatase motif and any linker sequences present. In one such embodiment a sulfatase motif may be placed and/or be inserted within aas 1-15, 15-35, 35-55, 40-50, or 50-70 of a mature β2M sequence, such as those shown in FIG. 4. In one embodiment, sulfatase motifs may be located between aas 35-55 (e.g., between aas 40 to 50) of the human mature β2M polypeptide sequence of FIG. 4 and may have 0 to 15 aa substitutions compared with a sequence shown in FIG. 4 (either an entire sequence shown in FIG. 4, or the sequence of a mature polypeptides starting at aa 21 and ending at its C-terminus).

[0162] A sulfatase motif may be incorporated into, or attached to (e.g., via a peptide linker), a MHC Class I heavy chain polypeptide sequence having at least 85% (e.g., at least 90%, 95%, 98% or 99%, or even 100%) aa sequence identity to at least 150, 175, 200, or 225 contiguous aas of a MHC-H sequence shown in FIGS. 3A to 3I before the addition of the sulfatase motif.

[0163] In an embodiment, the added sulfatase motif is attached to the N- or C-terminus of a T-Cell-MP or, if present, attached to or within a linker located at the N- or C-terminus of the T-Cell-MP.

[0164] U.S. Pat. No. 9,540,438 discusses the incorporation of sulfatase motifs into the various Ig sequences, including Fc region polypeptides, and is herein incorporated by reference for its teachings on sulfatase motifs and modification of Fc polypeptides and other polypeptides. That patent is also incorporated by reference for its guidance on FGE enzymes, and their use in forming fGly residues, as well as the chemistry related to the coupling of molecules such as epitopes and payloads to fGly residues.

[0165] The incorporation of a sulfatase motif may be accomplished by incorporating a nucleic acid sequence encoding the motif at the desired location in a nucleic acid encoding a T-Cell-MP. As discussed below, the nucleic acid sequence may be placed under the control of a transcriptional regulatory sequence(s) (a promoter) and provided with regulatory elements that direct its expression. The expressed protein may be treated with one or more FGEs after expression and partial or complete purification. Alternatively, expression of the nucleic acid in cells that express a FGE that recognizes the sulfatase motif results in the conversion of the cysteine or serine of the motif to fGly.

[0166] In view of the foregoing, this disclosure provides for T-Cell-MPs comprising one or more fGly residues incorporated into a T-Cell-MP polypeptide chain as discussed above. The fGly residues may, for example, be in the context of the sequence X1(fGly)X2Z2X3Z3, where: fGly is the formylglycine residue; and Z2, Z3, X1, X2 and X3 are as defined in Formula (I) above. Epitopes and/or payloads may be conjugated either directly or indirectly to the reactive formyl glycine of the sulfatase motif directly or through a peptide or chemical linker. After chemical conjugation the T-Cell-MPs comprise one or more fGly′ residues incorporated in the context of the sequence X1(fGly′)X2Z2X3Z3, where the fGly′ residue is formylglycine that has undergone a chemical reaction and now has a covalently attached epitope or payload.

[0167] A number of chemistries and commercially available reagents can be utilized to conjugate a molecule (e.g., an epitope or payload) to an fGly residue, including, but not limited to, the use of thiosemicarbazide, aminooxy, hydrazide, or hydrazino derivatives of the molecules to be coupled at an fGly-containing chemical conjugation site. For example, epitopes (e.g., peptide epitopes) and/or payloads bearing thiosemicarbazide, aminooxy, hydrazide, hydrazino or hydrazinyl functional groups (e.g., attached directly to an aa of a peptide or via a linker such as a PEG) can be reacted with fGly-containing T-Cell-MP polypeptides to form a covalently linked epitope. Similarly, targeting sequences (e.g., polypeptides comprising a targeting sequence), and/or payloads such as drugs and therapeutics can be incorporated using, for example, biotin hydrazide as a linking agent. For example, an epitope (e.g., an epitope presenting peptide, phosphopeptide, lipopeptide, or glycopeptide) such as a peptide epitope having a length from about 4 aa to about 20 aa (e.g., 4 aa, 5 aa, 6 aa, 7 aa, 8 aa, 9 aa, 10 aa, 11 aa, 12 aa, 13 aa, 14 aa, 15 aa, 16 aa, 17 aa, 18 aa, 19 aa, or 20 aa) and/or one or more payloads or targeting sequences may be conjugated to a polypeptide comprising fGly sites.

[0168] The disclosure provides for methods of preparing conjugated T-Cell-MPs including T-Cell-MP-epitope conjugates and/or T-Cell-MP-payload conjugates comprising:
[0169] a) incorporating a nucleotide sequence encoding a sulfatase motif including a serine or cysteine (e.g., a sulfatase motif of Formula (I) or (II) such as X1CX2PX3Z3 (SEQ ID NO:67); CX1PX2Z3 (SEQ ID NO:68) discussed above) into a nucleic acid encoding an unconjugated T-Cell-MP;
[0170] b) expressing the sulfatase motif-containing unconjugated T-Cell-MP polypeptide in a cell that
   [0171] i) expresses a FGE and converts the serine or cysteine of the sulfatase motif to a fGly and partially or completely purifying the fGly-containing unconjugated T-Cell-MP, or
   [0172] ii) does not express a FGE that converts a serine or cysteine of the sulfatase motif to a fGly, and purifying or partially purifying the T-Cell-MP containing the sulfatase motif and contacting the purified or partially purified T-Cell-MP with a FGE that converts the serine or cysteine of the sulfatase motif into a fGly residue; and
[0173] c) contacting the fGly-containing polypeptides with an epitope and/or payload that has been functionalized with a group that forms a covalent bond between the aldehyde of the fGly and the epitope and/or payload; thereby forming a T-Cell-MP-epitope conjugate and/or T-Cell-MP payload conjugate.

[0174] In such methods the epitope (epitope containing molecule) and/or payload may be functionalized by any suitable function group that reacts selectively with an aldehyde group. Such groups may, for example, be selected from the group consisting of thiosemicarbazide, aminooxy, hydrazide, and hydrazino. In an embodiment a sulfatase motif is incorporated into a second T-Cell-MP polypeptide comprising a β2M aa sequence with at least 85% (e.g., at least 90%, 95%, 98% or 99%, or even 100%) sequence identity to at least 60, 70, 80 or 90 contiguous aas of a β2M sequence shown in FIG. 4 (e.g., a mature β2M polypeptide with identity calculated without including or before the addition of the sulfatase motif sequence).

[0175] In an embodiment of the method of preparing a T-Cell-MP-epitope conjugate and/or T-Cell-MP payload conjugate, a sulfatase motif is incorporated into a polypeptide comprising a sequence having at least 85% (e.g., at least 90%, 95%, 98% or 99%, or even 100%) aa sequence identity to at least 150, 175, 200, or 225 contiguous aas of a sequence shown in FIGS. 3A-3I, with sequence identity calculated without including the addition of the sulfatase motif sequence).

b. Sortase A Enzyme Sites

[0176] Epitopes (e.g., peptides comprising the sequence of an epitope) and payloads may be attached at the N- and/or C-termini T-Cell-MP by incorporating sites for Sortase A conjugation at those locations.

[0177] Sortase A recognizes a C-terminal pentapeptide sequence LP (X5) TG/A (SEQ ID NO:69, with X5 being any single amino acid, and G/A being a glycine or alanine), and creates an amide bond between the threonine within the sequence and glycine or alanine in the N-terminus of the conjugation partner.

[0178] For attachment of epitopes or payloads to the C-terminal portion of a T-Cell-MP polypeptide a LP (X5) TG/A is provided in the carboxy terminal portion of the desired polypeptide(s), such as in an exposed L5 linker (see FIG. 5, structure A). An exposed stretch of glycines or alanines (e.g., (G)₃₋₅ (SEQ ID NOs: 70 and 71 when using Sortase A from Staphylococcus aureus or alanines (A)₃₋₅, SEQ ID NOs: 72 and 73 when using Sortase A from Streptococcus pyogenes) is provided at the N-terminus of a peptide that comprises an epitope (e.g., in a linker attached to the epitope), a peptide payload (or a linker attached thereto), or a peptide covalently attached to a non-peptide epitope or payload.

[0179] For attachment of epitopes or payloads to the amino terminus of a T-Cell-MP polypeptide, an aa sequence comprising an exposed stretch of glycines (e.g., (G)_{2, 3, 4, or 5}) or alanines (e.g., (A)_{2, 3, 4, or 5}) is provided at the N-terminus, and a LP (X5) TG/A is provided in the carboxy terminal portion of a peptide that comprises an epitope (or a linker attached thereto), a peptide payload (or a linker attached thereto), or a peptide covalently attached to a non-peptide epitope or payload.

[0180] Combining Sortase A with the amino and carboxy modified peptides described above results in a cleavage between the Thr and Gly/Ala residues in the LP (X5) TG/A sequence and formation of a covalently coupled complex of the form: carboxy-modified polypeptide-LP (X5) T*G/A-amino-modified polypeptide, where the “*” represents the bond formed between the threonine of the LP (X5) TG/A motif and the glycine or alanine of the N-terminal modified peptide.

[0181] In place of LP (X5) TG/A, a LPETGG (SEQ ID NO:74) peptide may be used for S. aureus Sortase A coupling, or a LPETAA (SEQ ID NO:75) peptide may be used for S. pyogenes Sortase A coupling. The conjugation reaction still occurs between the threonine and the amino terminal oligoglycine or oligoalanine peptide to yield a carboxy-modified polypeptide-LP (X5) T*G/A-amino-modified polypeptide, where the “*” represents the bond formed between the threonine and the glycine or alanine of the N-terminal modified peptide.

c. Transglutaminase Enzyme Sites

[0182] Transglutaminases (mTGs) catalyze the formation of a covalent bond between the amide group on the side chain of a glutamine residue and a primary amine donor (e.g., a primary alkyl amine, such as is found on the side chain of a lysine residue in a polypeptide). Transglutaminases may be employed to conjugate epitopes and payloads to T-Cell-MPs, either directly through a free amine, or indirectly via a linker comprising a free amine. As such, glutamine residues added to a T-Cell-MP in the context of a transglutaminase site may be considered as chemical conjugation sites when they can be accessed by enzymes such as Streptoverticillium mobaraense transglutaminase. That enzyme (EC 2.3.2.13) is a stable, calcium-independent enzyme catalyzing the γ-acyl transfer of glutamine to the ε-amino group of lysine. Glutamine residues appearing in a sequence are, however, not always accessible for enzymatic modification. The limited accessibility can be advantageous as it limits the number of locations where modification may occur. For example, bacterial mTGs are generally unable to modify glutamine residues in native IgG1s; however, Schibli and co-workers (Jeger, S., et al. (2010) Angew Chem (Int Engl). 49:99957 and Dennler P, et al. (2014) Bioconjug Chem. 25 (3): 569-78) found that deglycosylating IgG1s at N297 rendered glutamine residue Q295 accessible and permitted enzymatic ligation to create an antibody drug conjugate. Further, by producing a N297 to Q297 IgG1 mutant, they introduced two sites for enzymatic labeling by transglutaminase. Modification at N297 also offers the potential to reduce the interaction of the IgG Fc reaction with complement C1q protein.

[0183] Where a T-Cell-MP does not contain a glutamine that may be employed as a chemical conjugation site (e.g., it is not accessible to a transglutaminase or not placed in the desired location), a glutamine residue may be added to a sequence to form a transglutaminase site, or a sequence comprising a transglutaminase accessible glutamine (sometimes referred to as a “glutamine tag” or a “Q-tag”), may be incorporated through protein engineering into the polypeptide. The added glutamine or Q-tag may act as a chemical conjugation site for epitopes or payloads. US Pat. Pub. No. 2017/0043033 A1 describes the incorporation of glutamine residues and Q-tags and the use of transglutaminase for modifying polypeptides and is incorporated herein for those teachings.

[0184] Incorporation of glutamine residues and Q-tags may be accomplished chemically where the peptide is synthesized, or by modifying a nucleic acid that encodes the polypeptide and expressing the modified nucleic acid in a cell or cell-free system. In embodiments, the glutamine-containing Q-tag comprises an aa sequence selected from the group consisting of LQG, LLQGG (SEQ ID NO:76), LLQG (SEQ ID NO:77), LSLSQG (SEQ ID NO:78), and LLQLQG (SEQ ID NO:79) (numerous others are available).

[0185] Glutamine residues and Q-tags may be incorporated into any desired location of a T-Cell-MP. In an embodiment, a glutamine residue or Q-tag may be added in (e.g., at or near the terminus of) any T-Cell-MP element, including the MHC-H or β2M polypeptide sequences or any linker sequence joining them (the L3 linker). Glutamine residues and Q-tags may also be added to the scaffold polypeptide (e.g., the Ig Fc) or any of the linkers present in the T-Cell-MP (e.g., L1 to L6).

[0186] A glutamine residue or Q-tag may be incorporated into, or attached to (e.g., via a peptide linker), a β2M polypeptide in a T-Cell-MP with a sequence having at least 85% (e.g., at least 90%, 95%, 98% or 99%, or even 100%) aa sequence identity to at least 50 (e.g., at least 60, 70, 80, 90, 96, 97, or 98 or all) contiguous aas of a mature β2M polypeptide sequence shown in FIG. 4 (e.g., the sequences shown in FIG. 4 starting at aa 21 and ending at their C-terminus). The mature human β2M polypeptide sequence in FIG. 4 may be selected for incorporation of the glutamine residue or Q-tag. Sequence identity to the β2M polypeptides is determined relative to the corresponding portion of a β2M polypeptide in FIG. 4 without consideration of the added glutamine residue, Q-tag, or any linker or other sequences present.

[0187] In an embodiment, a glutamine residue or Q-tag may be incorporated into a β2M polypeptide sequence having 1 to 15 (e.g., 1, 2, 3, 4, 5, 6, 7, 8, 9, 10, 11, 12, 13, 14, or 15) aa deletions, insertions and/or changes compared with a sequence shown in FIG. 4 (either an entire sequence shown in FIG. 4, or the sequence of a mature polypeptide starting at aa 21 and ending at its C-terminus). Changes are assessed without consideration of the aas of the glutamine residue, Q-tag and any linker sequences present. In one such embodiment a glutamine residue or Q-tag may be placed and/or be inserted within aas 1-15, 15-35, 35-55, 40-50, or 50-70 of a mature β2M sequence, such as those shown in FIG. 4. In one embodiment, a glutamine residue or Q-tag may be located between aas 35-55 (e.g., 40 to 50) of the human mature β2M polypeptide sequence of FIG. 4, and may have 0 to 15 aa substitutions.

[0188] A glutamine residue or Q-tag may be incorporated into, or attached to (e.g., via a peptide linker), a MHC Class I heavy chain polypeptide sequence having at least 85% (e.g., at least 90%, 95%, 98% or 99%, or even 100%) aa sequence identity to at least 150, 175, 200, or 225 contiguous aas of a MHC-H sequence shown in FIGS. 3A to 3I before the addition of the glutamine residue or Q-tag.

[0189] In an embodiment, the added glutamine residue or Q-tag is attached to the N- or C-terminus of a T-Cell-MP or, if present, attached to or within a linker located at the N- or C-terminus of the T-Cell-MP.

[0190] Payloads and epitopes that contain, or have been modified to contain, a primary amine group may be used as the amine donor in a transglutaminase-catalyzed reaction forming a covalent bond between a glutamine residue (e.g., a glutamine residue in a Q-tag) and the epitope or payload.

[0191] Where an epitope or payload does not comprise a suitable primary amine to permit it to act as the amine donor, the epitope or payload may be chemically modified to incorporate an amine group (e.g., modified to incorporate a primary amine by linkage to a lysine, aminocaproic acid, cadaverine etc.). Where an epitope or payload comprises a peptide and requires a primary amine to act as the amine donor, a lysine or another primary amine that a transglutaminase can act on may be incorporated into the peptide. Other amine containing compounds that may provide a primary amine group and that may be incorporated into, or at the end of, an alpha amino acid chain include, but are not limited to, homolysine, 2,7-diaminoheptanoic acid, and aminoheptanoic acid. Alternatively, the epitope or payload may be attached to a peptide or non-peptide linker that comprises a suitable amine group. Examples of suitable non-peptide linkers include an alkyl linker and a PEG (polyethylene glycol) linker.

[0192] Transglutaminase can be obtained from a variety of sources, including enzymes from: mammalian liver (e.g., guinea pig liver); fungi (e.g., Oomycetes, Actinomycetes, Saccharomyces, Candida, Cryptococcus, Monascus, or Rhizopus transglutaminases); myxomycetes (e.g., Physarum polycephalum transglutaminase); and/or bacteria including a variety of Streptoverticillium, Streptomyces, Actinomadura sp., Bacillus, and the like.

[0193] Q-tags may be created by inserting a glutamine or by modifying the aa sequence around a glutamine residue appearing in an Ig Fc, β2M, and/or MHC-H chain sequence appearing in a T-Cell-MP and used as a chemical conjugation site for addition of an epitope or payload. Similarly, Q-tags may be incorporated into the Ig Fc region as chemical conjugation sites that may be used for the conjugation of, for example, epitopes and/or payloads either directly or indirectly through a peptide or chemical linker bearing a primary amine.

d. Selenocysteine and Non-Natural Amino Acids as Chemical Conjugation Sites

[0194] One strategy for providing site-specific chemical conjugation sites into a T-Cell-MP polypeptide employs the insertion of aas with reactivity distinct from the naturally occurring proteinogenic L-amino acids present in the polypeptide. Such aas include, but are not limited to, selenocysteine (Sec), and the non-natural aas: acetylphenylalanine (p-acetyl-L-phenylalanine, pAcPhe); parazido phenylalanine (4-Azido-L-phenylalanine); and propynyl-tyrosine (2-Amino-3-(4-(prop-2-yn-1-yloxy)phenyl) propanoic acid). Thanos et al. in US Pat. Publication No. 20140051836 A1 discuss some other non-natural aas including O-methyl-L-tyrosine, O-4-allyl-L-tyrosine, tri-O-acetyl-GlcNAcβ-serine, isopropyl-L-phenylalanine, p-benzoyl-L-phenylalanine, L-phosphoserine, and p-propargyloxy-phenylalanine (e.g., 4-propargyloxy-L-phenylalanine). Other non-natural aas include reactive groups such as, for example, amino, carboxy, acetyl, hydrazino, hydrazido, semicarbazido, sulfanyl, azido and alkynyl. See, e.g., US Pat. Publication No. 20140046030 A1.

[0195] In addition to directly synthesizing polypeptides in the laboratory, two methods utilizing stop codons have been developed to incorporate non-natural aas into proteins and polypeptides utilizing transcription-translation systems. The first incorporates selenocysteine (Sec) by pairing the opal stop codon, UGA, with a Sec insertion sequence. The second incorporates non-natural aas into a polypeptide generally through the use of amber, ochre, or opal stop codons. The use of other types of codons such as a unique codon, a rare codon, an unnatural codon, a five-base codon, and a four-base codon, and the use of nonsense and frameshift suppression have also been reported. See, e.g., US Pat. Publication No. 20140046030 A1 and Rodriguez et al., PNAS 103(23)8650-8655 (2006). By way of example, the non-natural amino acid acetylphenylalanine may be incorporated at an amber codon using a tRNA/aminoacyl tRNA synthetase pair in an in vivo or cell-free transcription-translation system.

[0196] Incorporation of both selenocysteine and non-natural aas requires engineering the necessary stop codon(s) into the nucleic acid coding sequence of the T-Cell-MP polypeptide at the desired location(s), after which the coding sequence is used to express the T-Cell-MP in an in vivo or cell-free transcription-translation system.

[0197] In vivo systems generally rely on engineered cell-lines to incorporate non-natural aas that act as bio-orthogonal chemical conjugation sites into polypeptides and proteins. See, e.g., International Published Application No. 2002/085923 entitled “In vivo incorporation of unnatural amino acids.” In vivo non-natural aa incorporation relies on a tRNA and an aminoacyl tRNA synthetase pair that is orthogonal to all the endogenous tRNAs and synthetases in the host cell. The non-natural aa of choice is supplemented to the media during cell culture or fermentation, making cell-permeability and stability important considerations.

[0198] Various cell-free synthesis systems provided with the charged tRNA may also be utilized to incorporate non-natural aas. Such systems include those described in US Pat. Publication No. 20160115487A1; Gubens et al., RNA. 2010 August; 16 (8): 1660-1672; Kim, D. M. and Swartz, J. R., Biotechnol. Bioeng. 66:180-8 (1999); Kim, D. M. and Swartz, J. R. Biotechnol. Prog. 16:385-90 (2000); Kim, D. M. and Swartz, J. R. Biotechnol. Bioeng. 74:309-16 (2001); Swartz et al, Methods Mol. Biol. 267:169-82 (2004); Kim, D. M. and Swartz, J. R. Biotechnol. Bioeng. 85:122-29 (2004); Jewett, M. C. and Swartz, J. R., Biotechnol. Bioeng. 86:19-26 (2004); Yin, G. and Swartz, J. R., Biotechnol. Bioeng. 86:188-95 (2004); Jewett, M. C. and Swartz, J. R., Biotechnol. Bioeng. 87:465-72 (2004); Voloshin, A. M. and Swartz, J. R., Biotechnol. Bioeng. 91:516-21 (2005).

[0199] Once incorporated into the T-Cell-MP, epitopes and/or payload bearing groups reactive with the incorporated selenocysteine or non-natural aa are brought into contact with the T-Cell-MP under suitable conditions to form a covalent bond. By way of example, the keto group of the pAcPhe is reactive towards alkoxyamines, and via oxime coupling can be conjugated directly to alkoxyamine containing epitopes and/or payloads or indirectly to epitopes and payloads via an alkoxyamine containing linker. Selenocysteine reacts with, for example, primary alkyl iodides (e.g., iodoacetamide which can be used as a linker), maleimides, and methylsulfone phenyloxadiazole groups. Accordingly, epitopes and/or payloads bearing those groups or bound to linkers bearing those groups can be covalently bound to polypeptide chains bearing selenocysteines.

[0200] As discussed above for other chemical conjugation sites, selenocysteines and/or non-natural aas may be incorporated into any desired location in the T-Cell-MP. In an embodiment, selenocysteines and/or non-natural aas may be added in (e.g., at or near the terminus of) any T-Cell-MP element, including the MHC-H or β2M polypeptide sequences or any linker sequence joining them (the L3 linker). Selenocysteines and/or non-natural aas may also be added to the scaffold polypeptide (e.g., the Ig Fc) or any of the linkers present in the T-Cell-MP (e.g., L1 to L6).

[0201] Selenocysteines and non-natural aas may be incorporated into, or attached to (e.g., via a peptide linker), a β2M polypeptide in a T-Cell-MP with a sequence having at least 85% (e.g., at least 90%, 95%, 98% or 99%, or even 100%) aa sequence identity to at least 50 (e.g., at least 60, 70, 80, 90, 96, 97, or 98 or all) contiguous aas of a mature β2M polypeptide sequence shown in FIG. 4 (e.g., the sequences shown in FIG. 4 starting at aa 21 and ending at their C-terminus). The mature human β2M polypeptide sequence in FIG. 4, may be selected for incorporation of the selenocysteines and non-natural aas. Sequence identity to the β2M polypeptides is determined relative to the corresponding portion of a β2M polypeptide in FIG. 4 without consideration of the added selenocysteines, non-natural aas, or any linker or other sequences present.

[0202] In an embodiment, a selenocysteine(s) or non-natural aa(s) may be incorporated into a β2M polypeptide sequence having 1 to 15 (e.g., 1, 2, 3, 4, 5, 6, 7, 8, 9, 10, 11, 12, 13, 14, or 15) aa deletions, insertions and/or changes compared with a sequence shown in FIG. 4 (either an entire sequence shown in FIG. 4, or the sequence of a mature polypeptide starting at aa 21 and ending at its C-terminus). Changes are assessed without consideration of the selenocysteine(s), non-natural aa(s), and any linker sequences present. In one such embodiment, a selenocysteines or non-natural aa may be placed and/or be inserted within aas 1-15, 15-35, 35-55, 40-50, or 50-70 of a mature β2M sequence, such as those shown in FIG. 4. In one embodiment, selenocysteines or non-natural aas may be located between aas 35-55 (e.g., 40 to 50) of the human mature β2M polypeptide sequence of FIG. 4 and may have 0 to 15 aa substitutions.

[0203] A selenocysteine or non-natural aa may be incorporated into, or attached to (e.g., via a peptide linker), a MHC Class I heavy chain polypeptide sequence having at least 85% (e.g., at least 90%, 95%, 98% or 99%, or even 100%) aa sequence identity to at least 150, 175, 200, or 225 contiguous aas of a MHC-H sequence shown in FIGS. 3A to 3I before the addition of the selenocysteines or non-natural aas.

[0204] In an embodiment, the added selenocysteine(s) or non-natural aa(s) is attached to the N- or C-terminus of a T-Cell-MP or, if present, attached to or within a linker located at the N- or C-terminus of the T-Cell-MP. In one such embodiment they may be utilized as sites for the conjugation of, for example, epitopes, targeting sequences (e.g., polypeptides comprising a targeting sequence), and/or payloads conjugated to the T-Cell-MP either directly or indirectly through a peptide or chemical linker.

e. Amino Acid Chemical Conjugation Sites

[0205] Any of the variety of functionalities (e.g., —SH, —NH₃, —OH, —COOH and the like) present in the side chains of naturally occurring amino acids, or at the termini of polypeptides, can be used as chemical conjugation sites. This includes the side chains of lysine and cysteine, which are readily modifiable by reagents including N-hydroxysuccinimide and maleimide functionalities, respectively. The main disadvantages of utilizing such amino acid residues is the potential variability and heterogeneity of the products. For example, an IgG has over 80 lysines, with over 20 at solvent-accessible sites. See, e.g., McComb and Owen, AAPS J. 117(2): 339-351. Cysteines tend to be less widely distributed; they tend to be engaged in disulfide bonds, and may be inaccessible (e.g., not accessible by solvent or to molecules used to modify the cysteines), and not located where it is desirable to place a chemical conjugation site. It is, however, possible to selectively modify T-Cell-MP polypeptides to provide naturally occurring and, as discussed above, non-naturally occurring amino acids at the desired locations for placement of a chemical conjugation site. Modification may take the form of direct chemical synthesis of the polypeptides (e.g., by coupling appropriately blocked amino acids) and/or by modifying the sequence of a nucleic acid encoding the polypeptide following expression in a cell or cell-free system. Accordingly, this disclosure includes and provides for the preparation of the T-Cell-MP polypeptides by transcription/translation systems capable of incorporating a non-natural aa or natural aa (including selenocysteine) to be used as a chemical conjugation site for epitope or payload conjugation.

[0206] This disclosure includes and provides for the preparation of a portion of a T-Cell-MP by transcription/translation systems and joining to its C- or N-terminus a polypeptide bearing a non-natural aa or natural aa (including selenocysteine) prepared by, for example, chemical synthesis. The polypeptide, which may include a linker, may be joined by any suitable method including the use of a sortase as described above for peptide epitopes. In an embodiment, the polypeptide may comprise a sequence of 2, 3, 4, or 5 alanines or glycines that may serve for sortase conjugation and/or as part of a linker sequence.

[0207] A naturally occurring aa (e.g., a cysteine) to be used as a chemical conjugation site may be provided at any desired location of a T-Cell-MP. In an embodiment, the naturally occurring aa may be provided in (e.g., at or near the terminus of) any T-Cell-MP element, including the MHC-H or β2M polypeptide sequences or any linker sequence joining them (the L3 linker). Naturally occurring aa(s) may also be provided in the scaffold polypeptide (e.g., the Ig Fc) or any of the linkers present in the T-Cell-MP (e.g., L1 to L6).

[0208] A naturally occurring aa (e.g., a cysteine) may also be provided in (e.g., via protein engineering), or attached to (e.g., via a peptide linker), a β2M polypeptide in a T-Cell-MP with a sequence having at least 85% (e.g., at least 90%, 95%, 98% or 99%, or even 100%) aa sequence identity to at least 50 (e.g., at least 60, 70, 80, 90, 96, 97, or 98 or all) contiguous aas of a mature β2M polypeptide sequence shown in FIG. 4 (e.g., the sequences shown in FIG. 4 starting at aa 21 and ending at their C-terminus). The mature human β2M polypeptide sequence in FIG. 4 may be selected for incorporation of the naturally occurring aa. Sequence identity to the β2M polypeptides is determined relative to the corresponding portion of a β2M polypeptide in FIG. 4 without consideration of the added naturally occurring aa, any linker, or any other sequences present.

[0209] In an embodiment, a naturally occurring aa (e.g., a cysteine) may be provided, e.g., via protein engineering in a β2M polypeptide sequence having 1 to 15 (e.g., 1, 2, 3, 4, 5, 6, 7, 8, 9, 10, 11, 12, 13, 14, or 15) aa deletions, insertions and/or changes compared with a sequence shown in FIG. 4 (either an entire sequence shown in FIG. 4, or the sequence of a mature polypeptide starting at aa 21 and ending at its C-terminus). Changes are assessed without consideration of the naturally occurring aa that will be used as a conjugation site, any linker, or other sequences present. In one such embodiment a naturally occurring aa (e.g., a cysteine) may be engineered (e.g., using the techniques of molecular biology) within aas 1-15, 15-35, 35-55, 40-50, or 50-70 of a mature β2M sequence, such as those shown in FIG. 4. In one embodiment, a naturally occurring aa (e.g., a cysteine) may be provided between aas 35-55 (e.g., between 40 and 50, between 42 and 48, between 43 and 45, or at aa 44) of the human mature β2M polypeptide sequence of FIG. 4 and may have 0 to 15 aa substitutions.

[0210] A naturally occurring aa (e.g., a cysteine) may be provided in, or attached to (e.g., via a peptide linker), a MHC Class I heavy chain polypeptide sequence having at least 85% (e.g., at least 90%, 95%, 98% or 99%, or even 100%) aa sequence identity to at least 150, 175, 200, or 225 contiguous aas of a MHC-H sequence shown in FIGS. 3A to 3I before the addition of the naturally occurring aa.

[0211] In an embodiment, the naturally occurring aa (e.g., a cysteine) may be attached to the N- or C-terminus of a T-Cell-MP, or attached to or within a linker, if present, located at the N- or C-terminus of the T-Cell-MP.

[0212] In one embodiment, a T-Cell-MP contains at least one naturally occurring aa (e.g., a cysteine) to be used as a chemical conjugation site provided, e.g., via protein engineering, in a β2M sequence as shown in FIG. 4, an Ig Fc sequence as shown in any of FIGS. 2A-G, or a MHC Class I heavy chain polypeptide as shown in FIGS. 3A-3I. In an embodiment, at least one naturally occurring aa to be used as a chemical conjugation site is provided in a polypeptide having at least 85% (e.g., at least 90%, 95%, 98% or 99%, or even 100%) aa sequence identity to at least 50 (e.g., at least 60, 70, 80, 90, 96, 97, or 98 or all) contiguous aas of a mature β2M sequence as shown in FIG. 4, an Ig Fc sequence as shown in FIG. 2, or at least 85% (e.g., at least 90%, 95%, 98% or 99%, or even 100%) aa sequence identity to at least 150, 175, 200, or 225 contiguous aas of a MHC Class I heavy chain polypeptide as shown in any of FIGS. 3A-3I. At least one naturally occurring aa (e.g., a cysteine) may be provided as a chemical conjugation site in a T-Cell-MP β2M aa sequence having at least 90% (e.g., at least 93%, 95%, 98% or 99%, or even 100%) aa sequence identity with at least the amino terminal 10, 20, 30, 40, 50, 60 or 70 aas of a mature β2M sequence as shown in FIG. 4. At least one naturally occurring aa (e.g., a cysteine) may be provided as a chemical conjugation site in a T-Cell-MP Ig Fc sequence (e.g., as shown in any of FIGS. 2A-2G). At least one naturally occurring aa (e.g., a cysteine) may be provided as a chemical conjugation site in a T-Cell-MP MHC Class I heavy chain polypeptide sequence having at least 85% (e.g., at least 90%, 95%, 98% or 99%, or even 100%) aa sequence identity to at least 150, 175, 200, or 225 contiguous aas of a MHC H polypeptide sequence provided in any of FIGS. 3A to 3I. In another embodiment, at least one naturally occurring aa to be used as a chemical conjugation site is provided in a T-Cell-MP polypeptide comprising at least 30, 40, 50, 60, 70, 80, 90, or 100 contiguous aas having 100% aa sequence identity to a MHC Class I heavy chain sequence as shown in any of FIGS. 3A to 3I or a mature β2M sequence as shown in FIG. 4.

[0213] In any of the embodiments mentioned above where a naturally occurring aa is provided, e.g., via protein engineering, in a polypeptide, the aa may be selected from the group consisting of arginine, lysine, cysteine, serine, threonine, glutamic acid, glutamine, aspartic acid, and asparagine. Alternatively, the aa provided as a conjugation site is selected from the group consisting of lysine, cysteine, serine, threonine, and glutamine. The aa provided as a conjugation site may also be selected from the group consisting of lysine, glutamine, and cysteine. In one instance, the provided aa is cysteine. In another instance, the provided aa is lysine. In still another instance, the provided aa is glutamine.

[0214] Any method known in the art may be used to couple payloads or epitopes to amino acids provided in an unconjugated T-Cell-MP. By way of example, maleimides may be utilized to couple to sulfhydryls, N-hydroxysuccinimide may be utilized to couple to amine groups, acid anhydrides or chlorides may be used to couple to alcohols or amines, and dehydrating agents may be used to couple alcohols or amines to carboxylic acid groups. Accordingly, using such chemistry an epitope or payload may be coupled directly, or indirectly through a linker (e.g., a homo- or hetero-bifunctional crosslinker), to a location on an unconjugated T-Cell-MP polypeptide. A number of bifunctional crosslinkers may be utilized, including, but not limited to, those described for linking a payload to a T-Cell-MP described herein below. For example, a peptide epitope (or a peptide-containing payload) including a maleimide group attached by way of a homo- or hetero-bifunctional linker (see, e.g., FIG. 9) or a maleimide amino acid can be conjugated to a sulfhydryl of a chemical conjugation site (e.g., a cysteine residue) that is naturally occurring or provided in a T-Cell-MP.

[0215] Maleimido amino acids can be incorporated directly into peptides (e.g., peptide epitopes) using a Diels-Alder/retro-Diels-Alder protecting scheme as part of a solid phase peptide synthesis. See, e.g., Koehler, Kenneth Christopher (2012), “Development and Implementation of Clickable Amino Acids,” Chemical & Biological Engineering Graduate Theses & Dissertations, 31, https://scholar.colorado.edu/chbe_gradetds/31.

[0216] A maleimide group may also be appended to an epitope (e.g., a peptide epitope) using a homo- or hetero-bifunctional linker (sometimes referred to as a crosslinker) that attaches a maleimide directly (or indirectly, e.g., through an intervening linker that may comprise additional aas bound to the epitope) to the epitope (e.g., peptide epitope). For example, a heterobifunctional N-hydroxysuccinimide-maleimide crosslinker can attach maleimide to an amine group of a peptide lysine. Some specific crosslinkers include molecules with a maleimide functionality and either a N-hydroxysuccinimide ester (NHS) or N-succinimidyl group that can attach a maleimide to an amine (e.g., an epsilon amino group of lysine). Examples of such crosslinkers include, but are not limited to, NHS-PEG4-maleimide, γ-maleimide butyric acid N-succinimidyl ester (GMBS); ε-maleimidocaproic acid N-hydroxysuccinimide ester (EMCS); m-maleimide benzoyl-N-hydroxysuccinimide ester (MBS); and N-(α-maleimidoacetoxy)-succinimide ester (AMAS), which offer different lengths and properties for peptide immobilization. Other amine reactive crosslinkers that incorporate a maleimide group include N-succinimidyl 4-(2-pyridyldithio) butanoate (SPDB). Additional crosslinkers (bifunctional agents) are recited below. In an embodiment the epitopes coupled to the T-Cell-MP have a maleimido alkyl carboxylic acid coupled to the peptide by an optional linker (see, e.g., FIGS. 8 and 9), coupled, for example, by an amide formed with the epsilon amino group of a lysine. The maleimido carboxylic acid can be, for example, a maleimido ethanoic, propanoic, butanoic, pentanoic, hexanoic, heptanoic, or octanoic acid.

[0217] A peptide epitope may be coupled to a naturally occurring cysteine present or provided in (e.g., engineered into), for example, the binding pocket of a T-Cell-MP through a bifunctional linker comprising a maleimide or a maleimide amino acid incorporated into the peptide, thereby forming a T-Cell-MP-epitope conjugate. A peptide epitope may be conjugated (e.g., by one or two maleimide amino acids or at least one maleimide containing bifunctional linker) to a MHC heavy chain having cysteine residues at any one or more locations within or adjacent to the MHC-H binding pocket. By way of example, a peptide epitope comprising maleimido amino acids or bearing a maleimide group as part of a crosslinker attached to the peptide may be covalently attached at 1 or 2 aas (e.g., cysteines) at MHC-H positions 2, 5, 7, 59, 84, 116, 139, 167, 168, 170, and/or 171 (e.g., Y7C, Y59C, Y116C, A139C, W167C, L168C, R170C, and Y171C substitutions) with the numbering as in FIGS. 3D-3I. A peptide epitope may also be conjugated (e.g., by one or two maleimide amino acids or at least one maleimide containing bifunctional linker) to a MHC heavy chain having cysteine residues at any one or more (e.g., 1 or 2) aa positions selected from positions 7 and/or 116, (e.g., Y7C and Y116C substitutions) with the numbering as in FIGS. 3D-3H. Cysteine substitution at positions 116 (e.g., Y116C) and/or 167 (e.g., W167C), with the numbering as in FIGS. 3D-3H, may be used separately or in combination to anchor epitopes (e.g., peptide epitopes) with one or two bonds formed through maleimide groups (e.g., at one or both of the ends of the epitope containing peptide).

[0218] Peptide epitopes may also be coupled to a naturally occurring cysteine present or provided in (e.g., engineered into) a β2M polypeptide sequence having at least 85% (e.g., at least 90%, 95% 97% or 100%) sequence identity to at least 60 contiguous amino acids (e.g., at least 70, 80, 90 or all contiguous aas) of a mature β2M polypeptide sequence set forth in FIG. 4. Some solvent accessible positions of mature β2M polypeptides that may be substituted by a cysteine to create a chemical conjugation site include: 2, 14, 16, 34, 36, 44, 45, 47, 48, 50, 58, 74, 77, 85, 88, 89, 91, 94, and 98 (Gln 2, Pro 14, Glu 16, Asp 34, Glu 36, Glu 44, Arg 45, Glu 47, Arg 48, Glu 50, Lys 58, Glu 74, Glu 77, Val 85, Ser 88, Gln 89, Lys 91, Lys 94, and Asp 98) of the mature peptide from NP_004039.1, or their corresponding amino acids in other β2M sequences (see the sequence alignment in FIG. 4). For example, epitopes may be conjugated to cysteines at positions 2, 44, 50, 77, 85, 88, 91, or 98 of the mature β2M polypeptides (aas 22, 64, 70, 97, 105, 108, 111, or 118 of the mature β2M sequences as shown in FIG. 4). Accordingly, the β2M sequences of a T-Cell-MP may contain cysteine chemical conjugation sites provided (e.g., by protein engineering) in the mature β2M sequence selected from Q2C, E44C, E50C, E77C, V85C, S88C, K91C, and D98C. The cysteine chemical conjugation sites in β2M sequences may also be combined with MHC-H Y84C and A139C substitutions made to stabilize the MHC H by forming an intrachain disulfide bond between MHC-H sequences. In one instance, the cysteine chemical conjugation site provided in the mature β2M is located at E44 (an E44C substitution). In another instance, the cysteine chemical conjugation site provided in the mature β2M is located at E44 (an E44C substitution) and the β2M sequence also comprises MHC-H Y84C and A139C substitutions that form an intrachain disulfide bond.

[0219] Where conjugation of an epitope, targeting sequence (e.g., a polypeptide comprising a targeting sequence), and/or payload is to be conducted through a cysteine chemical conjugation site present in an unconjugated T-cell-MP (e.g., using a maleimide modified epitope or payload) a variety of process conditions may affect the conjugation efficiency and the quality (e.g., the amount/fraction of unaggregated duplex T-Cell-MP-epitope conjugate resulting from the reaction) of conjugated T-Cell-MP resulting from the conjugation reaction. Conjugation process conditions that may be individually optimized include but are not limited to (i) prior to conjugation unblocking of cysteine sulfhydryls (e.g., potential blocking groups may be present and removed), (ii) the ratio of the T-Cell-MP to the epitope or payload, (iii) the reaction pH, (iv) the buffer employed, (v) additives present in the reaction, (vi) the reaction temperature, and (vii) the reaction time.

[0220] Prior to conjugation T-Cell-MPs may be treated with a disulfide reducing agent such as dithiothreitol (DTT), mercaptoethanol, or tris(2-carboxyethyl) phosphine (TCEP) to reduce and free cysteine sulfhydryls that may be blocked. Treatment may be conducted using relatively low amounts of reducing agent, for example from about 0.5 to 2.0 reducing equivalents per cysteine conjugation site for relatively short periods, and the cysteine chemical conjugation site of the unconjugated T-Cell-MP may be available as a reactive nucleophile for conjugation from about 10 minutes to about 1 hour, or from about 1 hour to 5 hours.

[0221] The ratio of the unconjugated T-Cell-MP to the epitope or payload being conjugated may be varied from about 1:2 to about 1:100, such as from about 1:2 to about 1:3, from about 1:3 to about 1:10, from about 1:10 to about 1:20, from about 1:20 to about 1:40, or from about 1:40 to about 1:100. The use of sequential additions of the reactive epitope or payload may be made to drive the coupling reaction to completion (e.g., multiple does of maleimide or N-hydroxy succinimide modified epitopes may be added to react with the T-Cell-MP).

[0222] As previously indicated, the conjugation reaction may be affected by the buffer, its pH, and additives that may be present. For maleimide coupling to reactive cysteines present in a T-Cell-MP the reactions are typically carried out from about pH 6.5 to about pH 8.5 (e.g., from about pH 6.5 to about pH 7.0, from about pH 7.0 to about pH 7.5, from about pH 7.5 to about pH 8.0, or from about pH 8.0 to about pH 8.5). Any suitable buffer not containing active nucleophiles (e.g., reactive thiols) and preferably degassed to avoid reoxidation of the sulfhydryl may be employed for the reaction. Some suitable traditional buffers include phosphate buffered saline (PBS), Tris-HCl, and (4-(2-hydroxyethyl)-1-piperazineethanesulfonic acid) HEPES. As an alternative to traditional buffers, maleimide conjugation reactions may be conducted in buffers/reaction mixtures comprising amino acids such as arginine, glycine, lysine, or histidine. The use of high concentrations of amino acids, e.g., from about 0.1 M (molar) to about 1.5 M (e.g., from about 0.1 to about 0.25, from about 0.25 to about 0.5 from about 0.3 to about 0.6, from about 0.4 to about 0.7, from about 0.5 to about 0.75, from about 0.75 to about 1.0, from about 1.0 to about 1.25 M, or from about 1.25 to about 1.5 M) may stabilize the conjugated and/or unconjugated T-Cell-MP.

[0223] Additives useful for maleimide and other conjugation reactions include, but are not limited to: protease inhibitors; metal chelators (e.g., EDTA) that can block unwanted side reactions and inhibit metal dependent proteases if they are present; detergents (e.g., polysorbate 80 sold as TWEEN 80®, or nonylphenoxypolyethoxyethanol sold under the names NP40 and Tergitol™ NP); and polyols such as sucrose or glycerol that can add to protein stability.

[0224] Conjugation of T-Cell-MPs with epitopes, targeting sequences (e.g., polypeptides comprising a targeting sequence), and/or payloads, and particularly conjugation at cysteines using maleimide chemistry, can be conducted over a range of temperatures, such as 0° to 40° C. For example, conjugation reactions, including cysteine-maleimide reactions, can be conducted from about 0° to about 10° C., from about 10° to about 20° C., from about 20° to about 30° C., from about 25° to about 37° C., or from about 30° to about 40° C. (e.g., at about 20° C., at about 30° C. or at about 37° C.).

[0225] Where a pair of sulfhydryl groups are present, they may be employed simultaneously for chemical conjugation to a T-Cell-MP. In such an embodiment, an unconjugated T-Cell-MP that has a disulfide bond, or that has two cysteines (or selenocysteines) provided at locations proximate to each other, may be utilized as a chemical conjugation site by incorporation of bis-thiol linkers. Bis-thiol linkers, described by Godwin and co-workers, avoid the instability associated with reducing a disulfide bond by forming a bridging group in its place and at the same time permit the incorporation of another molecule, which can be an epitope or payload. See, e.g., t G, et al., (2014), Bioconjug Chem., 25 (6): 1124-36, entitled Bridging disulfides for stable and defined antibody drug conjugates, describing the use of bis-sulfone reagents, which incorporate a hydrophilic linker (e.g., PEG (polyethylene glycol) linker).

[0226] Generally, stoichiometric or near stoichiometric amounts of dithiol reducing agents (e.g., dithiothreitol) are employed to reduce the disulfide bond and allow the bis-thiol linker to react with both cysteine and/or selenocysteine residues. Where multiple disulfide bonds are present, the use of stoichiometric or near stoichiometric amounts of reducing agents may allow for selective modification at one site. See, e.g., Brocchini, et al., Adv. Drug. Delivery Rev. (2008) 60:3-12. Where a T-Cell-MP or duplexed T-Cell-MP does not comprise a pair of cysteines and/or selenocysteines (e.g., a selenocysteine and a cysteine), they may be provided in the polypeptide (by introducing one or both of the cysteines or selenocysteines) to provide a pair of residues that can interact with a bis-thiol linker. The cysteines and/or selenocysteines should be located such that a bis-thiol linker can bridge them (e.g., at a location where two cysteines could form a disulfide bond). Any combination of cysteines and selenocysteines may be employed (i.e. two cysteines, two selenocysteines, or a selenocysteine and a cysteine). The cysteines and/or selenocysteines may both be present on a T-Cell-MP. Alternatively, in a duplex T-Cell-MP the first cysteine and/or selenocysteine is present in the first T-Cell-MP of the duplex and a second cysteine and/or selenocysteine is present in the second T-Cell-MP of the duplex, with the bis-thiol linker acting as a covalent bridge between the duplexed T-Cell-MPs.

[0227] In an embodiment, a pair of cysteine and/or selenocysteine residues is incorporated into a β2M sequence of a T-Cell-MP having at least 85% (e.g., at least 90%, 95%, 98% or 99%, or even 100%) aa sequence identity to at least 50 (e.g., at least 60, 70, 80, 90, 96, 97, or 98 or all) contiguous aas of a mature β2M polypeptide sequence shown in FIG. 4 before the addition of the pair of cysteines and/or selenocysteines, and/or into an L2 or L3 peptide linker attached to one of those sequences. In one such embodiment the pair of cysteines and/or selenocysteines may be utilized as a bis-thiol linker coupling site for the conjugation of an epitope and/or payload through a peptide or chemical linker attached to the bis-thiol group.

[0228] In another embodiment, a pair of cysteines and/or selenocysteines is incorporated into a MHC-H polypeptide sequence of a T-Cell-MP as a chemical conjugation site. In an embodiment, a pair of cysteines and/or selenocysteines is incorporated into a polypeptide comprising a sequence having at least 85% (e.g., at least 90%, 95%, 98% or 99%, or even 100%) aa sequence identity to a sequence having at least 150, 175, 200, or 225 contiguous aas of a MHC-H sequence shown in any of FIGS. 3A-3I before the addition of a pair of cysteines or selenocysteines, or into a peptide linker attached to one of those sequences. In one such embodiment the pair of cysteines and/or selenocysteines may be utilized as a bis-thiol linker coupling site for the conjugation of an epitope and/or payload through a peptide or chemical linker attached to the bis-thiol linker. Where the MHC-H sequence includes a Y84C and A139C substitutions the bis-thiol linker may be used to form a covalent bridge between those sites for the covalent coupling of an epitope (e.g., a peptide epitope).

[0229] In another embodiment, a pair of cysteines and/or selenocysteines is incorporated into an Ig Fc sequence of a T-Cell-MP to provide a chemical conjugation site. In an embodiment a pair of cysteines and/or selenocysteines is incorporated into a polypeptide comprising an Ig Fc sequence having at least 85% (e.g., at least 90%, 95%, 98% or 99%, or even 100%) aa sequence identity to a sequence shown in any of the Fc sequences of FIGS. 2A-2G before the addition of the pair of cysteines or selenocysteines. In one such embodiment the pair of cysteines and/or selenocysteines is utilized as a bis-thiol linker coupling site for the conjugation of an epitope and/or payload through a peptide or chemical linker attached to the bis-thiol group. The bis-thiol linker may be used to form a covalent bridge between scaffold polypeptides of a duplex T-Cell-MP. In such a case the cysteines of the lower hinge region that form interchain disulfide bonds, if present in the Ig Fc scaffold polypeptide sequence, may be used to insert the bis-thiol linker.

f. Other Chemical Conjugation Sites

### (i) Carbohydrate Chemical Conjugation Sites

[0230] Many proteins prepared by cellular expression contain added carbohydrates (e.g., oligosaccharides of the type added to antibodies expressed in mammalian cells). Accordingly, where a T-Cell-MP is prepared by cellular expression, carbohydrates may be present and available as selective chemical conjugation sites in, for example, glycol-conjugation reactions, particularly where the T-Cell-MP comprises an Ig Fc scaffold. McCombs and Owen, AAPS Journal, (2015) 17(2): 339-351, and references cited therein, describe the use of carbohydrate residues for glycol-conjugation of molecules to antibodies.

[0231] The addition and modification of carbohydrate residues may also be conducted in vitro, through the use of chemicals that alter the carbohydrates (e.g., periodate, which introduces aldehyde groups), or by the action of enzymes (e.g., fucosyltransferases) that can incorporate chemically reactive carbohydrates or carbohydrate analogs for use as chemical conjugation sites. In an embodiment, the incorporation of an Ig Fc scaffold with known glycosylation sites may be used to introduce site specific chemical conjugation sites.

[0232] This disclosure includes and provides for T-Cell-MPs having carbohydrates as chemical conjugation (e.g., glycol-conjugation) sites.

[0233] The disclosure also includes and provides for the use of such molecules in forming conjugates with epitopes and with other molecules such as polypeptide comprising targeting sequences, drugs, and diagnostic agent payloads.

### (ii) Nucleotide Binding Sites

[0234] Nucleotide binding sites offer site-specific functionalization through the use of a UV-reactive moiety that can covalently link to the binding site. Bilgicer et al., Bioconjug Chem. (2014) 25(7):1198-202, reported the use of an indole-3-butyric acid (IBA) moiety that can be covalently linked to an IgG at a nucleotide binding site. By incorporation of the sequences required to form a nucleotide binding site, chemical conjugates of T-Cell-MP with suitably modified epitopes and/or other molecules (e.g., payload drugs or diagnostic agents) bearing a reactive nucleotide may be employed to prepare T-Cell-MP-epitope conjugates. The epitope or payload may be coupled to the nucleotide binding site through the reactive entity (e.g., an IBA moiety) either directly or indirectly through an interposed linker.

[0235] This disclosure includes and provides for T-Cell-MPs having nucleotide binding sites as chemical conjugation sites. The disclosure also includes and provides for the use of such molecules in forming conjugates with epitopes and with other molecules such as drugs and diagnostic agents, and the use of those molecules in methods of treatment and diagnosis.

3 MHC polypeptides of T-Cell-MPs

[0236] As noted above, T-Cell-MPs include MHC polypeptides. For the purposes of the instant disclosure, the term “major histocompatibility complex (MHC) polypeptides” is meant to include MHC Class I polypeptides of various species, including human MHC (also referred to as human leukocyte antigen (HLA)) polypeptides, rodent (e.g., mouse, rat, etc.) MHC polypeptides, and MHC polypeptides of other mammalian species (e.g., lagomorphs, non-human primates, canines, felines, ungulates (e.g., equines, bovines, ovines, caprines, etc.), and the like. The term “MHC polypeptide” is meant to include Class I MHC polypeptides (e.g., β-2 microglobulin and MHC Class I heavy chain and/or portions thereof). Both the β2M and MHC-H chain sequences in a T-Cell-MP (may be of human origin. Unless expressly stated otherwise, the T-Cell-MPs and the T-Cell-MP-epitope conjugates described herein are not intended to include membrane anchoring domains (transmembrane regions) of a MHC-H chain, or a part of that molecule sufficient to anchor a T-Cell-MP, or a peptide thereof, to a cell (e.g., eukaryotic cell such as a mammalian cell) in which it is expressed. In addition, the MHC-H chain present in T-Cell-MPs does not include a signal peptide, a transmembrane domain, or an intracellular domain (cytoplasmic tail) associated with a native MHC Class I heavy chain. Thus, e.g., in some cases, the MHC-H chain present in a T-Cell-MP includes only the α1, α2, and α3 domains of a MHC Class I heavy chain. The MHC Class I heavy chain present in a T-Cell-MP may have a length of from about 270 amino acids (aa) to about 290 aa. The MHC Class I heavy chain present in a T-Cell-MP may have a length of 270 aa, 271 aa, 272 aa, 273 aa, 274 aa, 275 aa, 276 aa, 277 aa, 278 aa, 279 aa, 280 aa, 281 aa, 282 aa, 283 aa, 284 aa, 285 aa, 286 aa, 287 aa, 288 aa, 289 aa, or 290 aa.

[0237] The Class I HLA heavy chain polypeptides of T-Cell-MPs may comprise polypeptide sequences having at least 95%, or at least 98% aa sequence identity to all or part, for example at least about 200 (e.g., at least about 225, at least about 250, or at least about 260) contiguous aas, of the sequence of any of the human HLA heavy chain polypeptides depicted in FIGS. 3A to 3I (e.g., the sequences encompassing the α1, α2, and α3 domains). The Class I HLA heavy chain polypeptides of T-Cell-MPs may comprise polypeptide sequences having at least 95%, or at least 98% aa sequence identity to at least about 200 (e.g., at least about 225, at least about 250, or at least about 260) contiguous aas of the sequence of any of the human HLA heavy chain polypeptides depicted in FIGS. 3A to 3I (e.g., the sequences encompassing the α1, α2, and α3 domains). The Class I HLA heavy chain polypeptides of T-Cell-MPs may comprise polypeptide sequences having at least 95%, or at least 98% aa sequence identity to all or part, for example at least about 220 or at least about 240 contiguous aas, of the sequence of any of the human HLA heavy chain polypeptides depicted in FIGS. 3A to 3I (e.g., the sequences encompassing the α1, α2, and α3 domains). When calculating the percent aa sequence identity of a sequence (a “test sequence”) to any consensus sequence provided herein, aa residues of the test sequence at a position that aligns with variable residue and contain an amino acid recited among the amino acids present at variable residue in the consensus sequence may be counted as having identity. By way of example, where a test sequence recites a glu residue at a position corresponding to variable position X1 of an MHC sequence, where X1 is glu or lys, the test sequence glu residue may be counted as having identity.

[0238] The Class I HLA heavy chain polypeptides may comprise 1-30, 1-5, 5-10, 10-15, 15-20, 20-25 or 25-30 aa insertions, deletions, and/or substitutions (in addition to those locations indicated as being variable in the heavy chain consensus sequences of FIGS. 3E to 3I).

[0239] As an example, a MHC Class I heavy chain polypeptide of a multimeric polypeptide may comprise an aa sequence having at least 85%, at least 90%, at least 95%, at least 98%, at least 99%, or 100% aa sequence identity to aas 25-300 (lacking all, or substantially all, of the leader, transmembrane and cytoplasmic sequences) or aas 25-365 (lacking the leader) of a human HLA-A heavy chain polypeptides depicted in FIGS. 3A, 3B and/or 3C. An MHC Class I heavy chain polypeptide of a multimeric polypeptide may comprise an aa sequence having at least 95%, or at least 98%, aa sequence identity to aas 25-300 of an HLA heavy chain polypeptides depicted in FIG. 3A, 3B, or 3C. An MHC Class I heavy chain polypeptide of a multimeric polypeptide may comprise an aa sequence having at least 99% or 100%, aa sequence identity to aas 25-300 of an HLA heavy chain polypeptides depicted in FIG. 3A, 3B, or 3C.

a. MHC Class I Heavy Chains

[0240] Class I human MHC polypeptides may be drawn from the classical HLA alleles (HLA-A, B, and C), or the non-classical HLA alleles (e.g., HLA-E, F and G). The following are non-limiting examples of MHC-H alleles and variants of those alleles that may be incorporated into T-Cell-MPs and their epitope conjugates.

### (i) HLA-A Heavy Chains

[0241] The HLA-A heavy chain peptide sequences, or portions thereof, that may be incorporated into a T-Cell-MP include, but are not limited to, the alleles: A*0101, A*0201, A*0301, A*1101, A*2301, A*2402, A*2407, A*3303, and A*3401, which are aligned without all, or substantially all, of the leader, transmembrane and cytoplasmic sequences in FIG. 3E. Any of those alleles may further comprise a substitution at one or more of positions 84 and/or 139 (as shown in FIG. 3E) selected from: a tyrosine to alanine at position 84 (Y84A); a tyrosine to cysteine at position 84 (Y84C); and an alanine to cysteine at position 139 (A139C). In addition, an HLA-A sequence having at least 85% (e.g., at least about 90%; at least about 95%; at least about 98%; or at least about 99%) or 100% aa sequence identity to all or part (e.g., 100, 150, 200, 225, 250, or 260 contiguous aas) of the sequence of those HLA-A alleles may also be incorporated into a T-Cell-MP (e.g., it may comprise 1-30, 1-5, 5-10, 10-15, 15-20, 20-25, or 25-30 aa insertions, deletions, and/or substitutions). The HLA-A heavy chain polypeptide sequence of a T-Cell-MP may comprise Y84C and A139C substitutions that may form a disulfide bond.

### (a) HLA-A*0101 (HLA-A*01:01:01:01)

[0242] A MHC Class I heavy chain polypeptide of a T-Cell-MP or a T-Cell-MP-epitope conjugate may comprise the aa sequence of HLA-A*01:01:01:01 (HLA-A*0101, or HLA-A*01:01 listed as HLA-A in FIG. 3D (SEQ ID NO:24) and in FIG. 3E), or a sequence having at least 85% (e.g., at least about 90%; at least about 95%; at least about 98%; or at least about 99%) or 100% aa sequence identity to all or part, for example at least 200 (e.g., at least 225, at least 250, or at least 260) contiguous aas of that sequence. For example, the sequence may comprise 1-30, 1-5, 5-10, 10-15, 15-20, 20-25, or 25-30 aa insertions, deletions, and/or substitutions). In an embodiment, where the HLA-A heavy chain polypeptide of a T-Cell-MP has less than 100% identity to the sequence labeled HLA-A in FIG. 3D, it may comprise a substitution at one or more of positions 84 and/or 139 selected from: a tyrosine to alanine at position 84 (Y84A); a tyrosine to cysteine at position 84 (Y84C); and an alanine to cysteine at position 139 (A139C). The HLA-A*0101 heavy chain polypeptide sequence of a T-Cell-MP may comprise Y84C and A139C substitutions that may form a disulfide bond.

### (b) HLA-A*0201 (HLA-A*02:01)

[0243] A MHC Class I heavy chain polypeptide of a T-Cell-MP or a T-Cell-MP-epitope conjugate may comprise an aa sequence of HLA-A*0201 (SEQ ID NO:27) provided in FIG. 3D or FIG. 3E, or a sequence having at least 85% (e.g., at least about 90%; at least about 95%; at least about 98%; or at least about 99%) or 100% aa sequence identity to all or part, for example at least 200 (e.g., at least 225, at least 250, or at least 260) contiguous aas of that sequence. For example, the sequence may comprise 1-30, 1-5, 5-10, 10-15, 15-20, 20-25, or 25-30 aa insertions, deletions, and/or substitutions). In an embodiment, where the HLA-A*0201 heavy chain polypeptide of a T-Cell-MP has less than 100% identity to the sequence labeled HLA-A*0201 in FIG. 3D or 3E, it may comprise a substitution at one or more of positions 84 and/or 139selected from: a tyrosine to alanine at position 84 (Y84A); a tyrosine to cysteine at position 84 (Y84C); and an alanine to cysteine at position 139 (A139C). The HLA-A*0201 heavy chain polypeptide sequence of a T-Cell-MP may comprise Y84C and A139C substitutions that may form a disulfide bond.

### (c) HLA-A*1101 (HLA-A*11:01)

[0244] A MHC Class I heavy chain polypeptide of a T-Cell-MP or a T-Cell-MP-epitope conjugate may comprise an aa sequence of HLA-A*1101 (SEQ ID NO:32) provided in FIG. 3D or 3E, or a sequence having at least 85% (e.g., at least about 90%; at least about 95%; at least about 98%; or at least about 99%) or 100% aa sequence identity to all or part, for example at least 200 (e.g., at least 225, at least 250, or at least 260) contiguous aas of that sequence. For example, the sequence may comprise 1-30, 1-5, 5-10, 10-15, 15-20, 20-25, or 25-30 aa insertions, deletions, and/or substitutions). The HLA-A*1101 heavy chain allele may be prominent in Asian populations, including populations of individuals of Asian descent.

[0245] In an embodiment, where the HLA-A*1101 heavy chain polypeptide of a T-Cell-MP has less than 100% identity to the sequence labeled HLA-A*1101 in FIG. 3D or 3E, it may comprise a substitution at one or more of positions 84 and/or 139 selected from: a tyrosine to alanine at position 84 (Y84A); a tyrosine to cysteine at position 84 (Y84C); and an alanine to cysteine at position 139 (A139C). The HLA-A*1101 heavy chain polypeptide sequence of a T-Cell-MP may comprise Y84C and A139C substitutions that may form a disulfide bond.

### (d) HLA-A*2402 (HLA-A*24:02)

[0246] A MHC Class I heavy chain polypeptide of a T-Cell-MP or a T-Cell-MP-epitope conjugate may comprise an aa sequence of HLA-A*2402 (SEQ ID NO:33) provided in FIG. 3D or 3E, or a sequence having at least 85% (e.g., at least about 90%; at least about 95%; at least about 98%; or at least about 99%) or 100% aa sequence identity to all or part, for example at least 200 (e.g., at least 225, at least 250, or at least 260) contiguous aas of that sequence. For example, the sequence may comprise 1-30, 1-5, 5-10, 10-15, 15-20, 20-25, or 25-30 aa insertions, deletions, and/or substitutions). The HLA-A*2402 heavy chain allele may be prominent in Asian populations, including populations of individuals of Asian descent.

[0247] In an embodiment, where the HLA-A*2402 heavy chain polypeptide of a T-Cell-MP has less than 100% identity to the sequence labeled HLA-A*2402 in FIG. 3D or 3E, it may comprise a substitution at one or more of positions 84 and/or selected from: a tyrosine to alanine at position 84 (Y84A); a tyrosine to cysteine at position 84 (Y84C); and an alanine to cysteine at position 139 (A139C). The HLA-A*2402 heavy chain polypeptide sequence of a T-Cell-MP may comprise Y84C and A139C substitutions that may form a disulfide bond.

### (e) HLA-A*3303 (HLA-A*33:03) or HLA-A*3401 (HLA-A*34:01)

[0248] A MHC Class I heavy chain polypeptide of a T-Cell-MP or a T-Cell-MP-epitope conjugate may comprise an aa sequence of HLA-A*3303 (SEQ ID NO:34) or HLA-A*3401 (SEQ ID NO:38) provided in FIG. 3D or 3E, or a sequence having at least 85% (e.g., at least about 90%; at least about 95%; at least about 98%; or at least about 99%) or 100% aa sequence identity to all or part, for example at least 200 (e.g., at least 225, at least 250, or at least 260) contiguous aas of either of those sequences. 1-30, 1-5, 5-10, 10-15, 15-20, 20-25, or 25-30 aa insertions, deletions, and/or substitutions). The HLA-A*3303 heavy chain allele may be prominent in Asian populations, including populations of individuals of Asian descent.

[0249] In an embodiment, where the HLA-A*3303 or HLA-A*3401 heavy chain polypeptide of a T-Cell-MP has less than 100% identity to the sequence labeled HLA-A*3303 in FIG. 3D, it may comprise a substitution at one or more of positions 84 and/or139 selected from: a tyrosine to alanine at position 84 (Y84A); a tyrosine to cysteine at position 84 (Y84C); and an alanine to cysteine at position 139 (A139C). The HLA-A*3303 or HLA-A*3401 heavy chain polypeptide sequence of a T-Cell-MP may comprise Y84C and A139C substitutions that may form a disulfide bond.

### (ii) HLA-B Heavy Chains.

[0250] The HLA-B heavy chain peptide sequences, or portions thereof, that may be incorporated into a T-Cell-MP include, but are not limited to, the alleles: B*0702, B*0801, B*1501, B*1502, B*2705, B*03501, B*3802, B*4001, B*4402, B*4403, B*4601, B*5301, and B*5801, some of which are aligned without all, or substantially all, of the leader, transmembrane and cytoplasmic sequences in FIG. 3F. Any of those alleles may comprise a substitution at one or more of positions 84 and/or 139 (as shown in FIG. 3F) selected from: a tyrosine to alanine at position 84 (Y84A); a tyrosine to cysteine at position 84 (Y84C); and an alanine to cysteine at position 139 (A139C). In addition, an HLA-B sequence having at least 85% (e.g., at least about 90%; at least about 95%; at least about 98%; or at least about 99%) or 100% sequence identity to all or part (e.g., 100, 150, 200, 225, 250, or 260 contiguous aas) of the sequence of those HLA-B alleles may also be incorporated into a T-Cell-MP (e.g., it may comprise 1-25, 1-5, 5-10, 10-15, 15-20, 20-25, or 25-30 aa insertions, deletions, and/or substitutions). The HLA-B heavy chain polypeptide sequence of a T-Cell-MP may comprise Y84C and A139C substitutions that may form a disulfide bond.

### (a) HLA-B*0702 (HLA-B*07:02)

[0251] A MHC Class I heavy chain polypeptide of a T-Cell-MP or a T-Cell-MP-epitope conjugate may comprise an aa sequence of HLA-B*0702 (SEQ ID NO:25) in FIG. 3D (labeled HLA-B in FIG. 3D), or a sequence having at least 85% (e.g., at least about 90%, at least about 95%, at least about 98%, or at least about 99%) or 100% aa sequence identity to all or part, for example at least 200 (e.g., at least 225, at least 250, or at least 260) contiguous aas of that sequence. For example, the sequence may comprise 1-30, 1-5, 5-10, 10-15, 15-20, 20-25, or 25-30 aa insertions, deletions, and/or substitutions). In an embodiment, where the HLA-B heavy chain polypeptide of a T-Cell-MP has less than 100% identity to the sequence labeled HLA-B in FIG. 3D, it may comprise a substitution at one or more of positions 84 and/or 139 selected from: a tyrosine to alanine at position 84 (Y84A); a tyrosine to cysteine at position 84 (Y84C); and an alanine to cysteine at position 139 (A139C). The HLA-B*0702 heavy chain polypeptide sequence of a T-Cell-MP may comprise Y84C and A139C substitutions.

### (b) HLA-B*1501 (HLA-B*15:01)

[0252] A MHC Class I heavy chain polypeptide of a T-Cell-MP or a T-Cell-MP-epitope conjugate may comprise an aa sequence of HLA-B*1501: GSHSMRYFYTAMSRPGRGEPRFIAVGYVDDTQFVRFDSDAASPRMAPRAPWIE QEGPEYWDRETQISKTNTQTYRESLRNLRGYYNQSEAGSHTLQRMYGCDVGPDGRLLRGHDQSAYDGKDYIALNE DLSSWTAADTAAQITQRKWEAAREAEQWRAYLEGLCVEWLRRYLENGKETLQRADPPKTHVTHHPISDHEATLRCW ALGFYPAEITLTWQRDGEDQTQDTELVETRPAGDRTFQKWAAVVVPSGEEQRYTCHVQHEGLPKPLTLRWEP (shown lacking its signal sequence and transmembrane/intracellular regions SEQ ID NO:2041), or a sequence having at least 85% (e.g., at least about 90%, at least about 95%, at least about 98%, or at least about 99%) or 100% aa sequence identity to all or part, for example at least 200 (e.g., at least 225, at least 250, or at least 260) contiguous aas of that sequence. For example, the sequence may comprise 1-30, 1-5, 5-10, 10-15, 15-20, 20-25, or 25-30 aa insertions, deletions, and/or substitutions). In an embodiment, the sequence may comprise a substitution at one or more of positions 84 and/or 139 selected from: a tyrosine to alanine at position 84 (Y84A); a tyrosine to cysteine at position 84 (Y84C); and an alanine to cysteine at position 139 (A139C). The HLA-B*3501 heavy chain polypeptide sequence of a T-Cell-MP may comprise Y84C and A139C substitutions.

### (c) HLA-B*2705 (HLA-B*27:05)

[0253] A MHC Class I heavy chain polypeptide of a T-Cell-MP or a T-Cell-MP-epitope conjugate may comprise an aa sequence of HLA-B*2705: GSHSMRYFHTSVSRPGRGEPRFITVGYVDDTLFVRFDSDAASPREEPRAPWIEQEGPEY WDRETQICKAKAQTDREDLRTLLRYYNQSEAGSHTLQNMYGCDVGPDGRLLRGYHQDAYDGKDYIALNEDLSSWT AADTAAQITQRKWEAARVAEQLRAYLEGECVEWLRRYLENGKETLQRADPPKTHVTHHPISDHEATLRCWALGFYP AEITLTWQRDGEDQTQDTELVETRPAGDRTFQKWAAVVVPSGEEQRYTCHVQHEGLPKPLTLRWEP (shown lacking its signal sequence and transmembrane/intracellular regions SEQ ID NO:2042), or a sequence having at least 85% (e.g., at least about 90%, at least about 95%, at least about 98%, or at least about 99%) or 100% aa sequence identity to all or part, for example at least 200 (e.g., at least 225, at least 250, or at least 260) contiguous aas of that sequence. For example, the sequence may comprise 1-30, 1-5, 5-10, 10-15, 15-20, 20-25, or 25-30 aa insertions, deletions, and/or substitutions). In an embodiment, the sequence may comprise a substitution at one or more of positions 84 and/or 139 selected from: a tyrosine to alanine at position 84 (Y84A); a tyrosine to cysteine at position 84 (Y84C); and an alanine to cysteine at position 139 (A139C). The HLA-B*3501 heavy chain polypeptide sequence of a T-Cell-MP may comprise Y84C and A139C substitutions.

### (d) HLA-B*3501 (HLA-B*35:01)

[0254] A MHC Class I heavy chain polypeptide of a T-Cell-MP or a T-Cell-MP-epitope conjugate may comprise an aa sequence of HLA-B*3501: GSHSMRYFYTAMSRPGRGEPRFIAVGYVDDTQFVRFDSDAASPRTEPRAPWIEQ EGPEYWDRNTQIFKTNTQTYRESLRNLRGYYNQSEAGSHIIQRMYGCDLGPDGRLLRGHDQSAYDGKDYIALNEDL SSWTAADTAAQITQRKWEAARVAEQLRAYLEGLCVEWLRRYLENGKETLQRADPPKTHVTHHPVSDHEATLRCWAL GFYPAEITLTWQRDGEDQTQDTELVETRPAGDRTFQKWAAVVVPSGEEQRYTCHVQHEGLPKPLTLRWEP (shown lacking its signal sequence and transmembrane/intracellular regions SEQ ID NO:80), or a sequence having at least 85% (e.g., at least about 90%, at least about 95%, at least about 98%, or at least about 99%) or 100% aa sequence identity to all or part, for example at least 200 (e.g., at least 225, at least 250, or at least 260) contiguous aas of that sequence. For example, the sequence may comprise 1-30, 1-5, 5-10, 10-15, 15-20, 20-25, or 25-30 aa insertions, deletions, and/or substitutions). In an embodiment, the sequence may comprise a substitution at one or more of positions 84 and/or 139 selected from: a tyrosine to alanine at position 84 (Y84A); a tyrosine to cysteine at position 84 (Y84C); and an alanine to cysteine at position 139 (A139C). The HLA-B*3501 heavy chain polypeptide sequence of a T-Cell-MP may comprise Y84C and A139C substitutions.

### (e) HLA-B*4402 (HLA-B*44:02)

[0255] A MHC Class I heavy chain polypeptide of a T-Cell-MP or a T-Cell-MP-epitope conjugate may comprise an aa sequence of HLA-B*4402: GSHSMRYFYTAMSRPGRGEPRFITVGYVDDTLFVRFDSDATSPRKEPRAPWIEQE GPEYWDRETQISKTNTQTYRENLRTALRYYNQSEAGSHIIQRMYGCDVGPDGRLLRGYDQDAYDGKDYIALNEDLSS WTAADTAAQITQRKWEAARVAEQDRAYLEGLCVESLRRYLENGKETLQRADPPKTHVTHHPISDHEVTLRCWALGF YPAEITLTWQRDGEDQTQDTELVETRPAGDRTFQKWAAVVVPSGEEQRYTCHVQHEGLPKPLTLRWEP (shown lacking its signal sequence and transmembrane/intracellular regions SEQ ID NO:81), or a sequence having at least 85% (e.g., at least about 90%, at least about 95%, at least about 98%, or at least about 99%) or 100% aa sequence identity to all or part, for example at least 200 (e.g., at least 225, at least 250, or at least 260) contiguous aas of that sequence. For example, the sequence may comprise 1-30, 1-5, 5-10, 10-15, 15-20, 20-25, or 25-30 aa insertions, deletions, and/or substitutions). In an embodiment, the sequence may comprise a substitution at one or more of positions 84 and/or 139 selected from: a tyrosine to alanine at position 84 (Y84A); a tyrosine to cysteine at position 84 (Y84C); and an alanine to cysteine at position 139 (A139C). The HLA-B*4402 heavy chain polypeptide sequence of a T-Cell-MP may comprise Y84C and A139C substitutions.

### (f) HLA-B*4403 (HLA-B*44:03)

[0256] A MHC Class I heavy chain polypeptide of a T-Cell-MP or a T-Cell-MP-epitope conjugate may comprise an aa sequence of HLA-B*4403: GSHSMRYFYTAMSRPGRGEPRFITVGYVDDTLFVRFDSDATSPRKEPRAPWIEQ EGPEYWDRETQISKTNTQTYRENLRTALRYYNQSEAGSHIIQRMYGCDVGPDGRLLRGYDQDAYDGKDYIALNEDLS SWTAADTAAQITQRKWEAARVAEQLRAYLEGLCVESLRRYLENGKETLQRADPPKTHVTHHPISDHEVTLRCWALGF YPAEITLTWQRDGEDQTQDTELVETRPAGDRTFQKWAAVVVPSGEEQRYTCHVQHEGLPKPLTLRWEP (shown lacking its signal sequence and transmembrane/intracellular regions SEQ ID NO:82), or a sequence having at least 85% (e.g., at least about 90%, at least about 95%, at least about 98%, or at least about 99%) or 100% aa sequence identity to all or part, for example at least 200 (e.g., at least 225, at least 250, or at least 260) contiguous aas of that sequence. For example, the sequence may comprise 1-30, 1-5, 5-10, 10-15, 15-20, 20-25, or 25-30 aa insertions, deletions, and/or substitutions). In an embodiment, the sequence may comprise a substitution at one or more of positions 84 and/or 139 selected from: a tyrosine to alanine at position 84 (Y84A); a tyrosine to cysteine at position 84 (Y84C); and an alanine to cysteine at position 139 (A139C). The HLA-B*4403 heavy chain polypeptide sequence of a T-Cell-MP may comprise Y84C and A139C substitutions.

### (g) HLA-B*5801 (HLA-B*58:01)

[0257] A MHC Class I heavy chain polypeptide of a T-Cell-MP or a T-Cell-MP-epitope conjugate may comprise an aa sequence of HLA-B*58:01: GSHSMRYFYTAMSRPGRGEPRFIAVGYVDDTQFVRFDSDAASPRTEPRAPWIEQ EGPEYWDGETRNMKASAQTYRENLRIALRYYNQSEAGSHIIQRMYGCDLGPDGRLLRGHDQSAYDGKDYIALNEDL SSWTAADTAAQITQRKWEAARVAEQLRAYLEGLCVEWLRRYLENGKETLQRADPPKTHVTHHPVSDHEATLRCWAL GFYPAEITLTWQRDGEDQTQDTELVETRPAGDRTFQKWAAVVVPSGEEQRYTCHVQHEGLPKPLTLRWEP (shown lacking its signal sequence and transmembrane/intracellular regions SEQ ID NO:83), or a sequence having at least 85% (e.g., at least about 90%, at least about 95%, at least about 98%, or at least about 99%) or 100% aa sequence identity to all or part, for example at least 200 (e.g., at least 225, at least 250, or at least 260) contiguous aas of that sequence. For example, the sequence may comprise 1-30, 1-5, 5-10, 10-15, 15-20, 20-25, or 25-30 aa insertions, deletions, and/or substitutions). In an embodiment, the sequence may comprise a substitution at one or more of positions 84 and/or 139 selected from: a tyrosine to alanine at position 84 (Y84A); a tyrosine to cysteine at position 84 (Y84C); and an alanine to cysteine at position 139 (A139C). The HLA-B*5901 heavy chain polypeptide sequence of a T-Cell-MP may comprise Y84C and A139C substitutions.

(iii) HLA-C Heavy Chains

[0258] The HLA-C heavy chain peptide sequences, or portions thereof, that may be incorporated into a T-Cell-MP include, but are not limited to, the alleles: C*0102, C*0303, C*0304, C*0401, C*0602, C*0701, C*0702, C*0801, and C*1502, which are aligned without all, or substantially all, of the leader, transmembrane and cytoplasmic sequences in FIG. 3G. Any of those alleles may comprise a substitution at one or more of positions 84, 139 and/or 236 (as shown in FIG. 3G) selected from: a tyrosine to alanine at position 84 (Y84A); a tyrosine to cysteine at position 84 (Y84C); and an alanine to cysteine at position 139 (A139C). In addition, an HLA-C sequence having at least 85% (e.g., at least about 90%, at least about 95%, at least about 98%, or at least about 99%) or 100% aa sequence identity to all or part, for example at least 200 (e.g., at least 225, at least 250, or at least 260) contiguous aas of any of those sequences. For example, the sequence may comprise 1-30, 1-5, 5-10, 10-15, 15-20, 20-25, or 25-30 aa insertions, deletions, and/or substitutions). The HLA-C heavy chain polypeptide sequence of a T-Cell-MP may comprise Y84C and A139C substitutions that may form a disulfide bond.

### (a) HLA-C*701 (HLA-C*07:01) and HLA-C*702 (HLA-C*07:02)

[0259] A MHC Class I heavy chain polypeptide of a T-Cell-MP or a T-Cell-MP-epitope conjugate may comprise an aa sequence of HLA-C*701 (SEQ ID NO:23) or HLA-C*702 (SEQ ID NO:54) in FIG. 3G (labeled HLA-C in FIG. 3D), or a sequence having at least 85% (e.g., at least about 90%, at least about 95%, at least about 98%, or at least about 99%) or 100% aa sequence identity to all or part, for example at least 200 (e.g., at least 225, at least 250, or at least 260) contiguous aas of any of those sequences. For example, the sequence may comprise 1-30, 1-5, 5-10, 10-15, 15-20, 20-25, or 25-30 aa insertions, deletions, and/or substitutions relative to those sequences). In an embodiment, where the HLA-C heavy chain polypeptide of a T-Cell-MP has less than 100% identity to the sequence labeled HLA-C in FIG. 3D, it may comprise a substitution at one or more of positions 84 and/or 139 selected from: a tyrosine to alanine at position 84 (Y84A); a tyrosine to cysteine at position 84 (Y84C); and an alanine to cysteine at position 139 (A139C). The HLA-C*701 or HLA-C*0702 heavy chain polypeptide sequence of a T-Cell-MP may comprise Y84C and A139C substitutions that may form a disulfide bond.

### (iv) Non-Classical HLA-E, F and G Heavy Chains

[0260] The non-classical HLA heavy chain peptide sequences, or portions thereof, that may be incorporated into a T-Cell-MP include, but are not limited to, those of the HLA-E, F, and/or G alleles. Sequences for those alleles, (and the HLA-A, B and C alleles) may be found on the World Wide Web at, for example, hla.alleles.org/nomenclature/index.html, the European Bioinformatics Institute (www.ebi.ac.uk), which is part of the European Molecular Biology Laboratory (EMBL), and the National Center for Biotechnology Information (www.ncbi.nlm.nih.gov).

[0261] Some suitable HLA-E alleles include, but are not limited to, HLA-E*0101 (HLA-E*01:01:01:01), HLA-E*01:03 (HLA-E*01:03:01:01), HLA-E*01:04, HLA-E*01:05, HLA-E*01:06, HLA-E*01:07, HLA-E*01:09, and HLA-E*01:10. Some suitable HLA-F alleles include, but are not limited to, HLA-F*0101 (HLA-F*01:01:01:01), HLA-F*01:02, HLA-F*01:03 (HLA-F*01:03:01:01), HLA-F*01:04, HLA-F*01:05, and HLA-F*01:06. Some suitable HLA-G alleles include, but are not limited to, HLA-G*0101 (HLA-G*01:01:01:01), HLA-G*01:02, HLA-G*01:03 (HLA-G*01:03:01:01), HLA-G*01:04 (HLA-G*01:04:01:01), HLA-G*01:06, HLA-G*01:07, HLA-G*01:08, HLA-G*01:09: HLA-G*01:10, HLA-G*01:11, HLA-G*01:12, HLA-G*01:14, HLA-G*01:15, HLA-G*01:16, HLA-G*01:17, HLA-G*01:18: HLA-G*01:19, HLA-G*01:20, and HLA-G*01:22. Consensus sequences for those HLA-E, -F, and -G alleles without all, or substantially all, of the leader, transmembrane and cytoplasmic sequences are provided in FIG. 3H, and aligned with consensus sequences of the above-mentioned HLA-A, -B, and -C alleles provided in FIGS. 3E-3G and in FIG. 3I.

[0262] Any of the above-mentioned HLA-E, F and/or G alleles may comprise a substitution at one or more of positions 84 and/or 139 as shown in FIG. 3I for the consensus sequences. In an embodiment, the substitutions may be selected from: a position 84 tyrosine to alanine (Y84A) or cysteine (Y84C), or in the case of HLA-F a R84A or R84C substitution; and/or a position 139 alanine to cysteine (A139C), or in the case of HLA-F a V139C substitution. In addition, HLA-E, -F, and/or -G sequences having at least 85% (e.g., at least about 90%; at least about 95%; at least about 98%; or at least about 99%) or 100% aa sequence identity to all or part (e.g., 100, 150, 200, 225, 250, or 260 contiguous aas) of any of the consensus sequences set forth in FIG. 3I may also be employed (e.g., the sequences may comprise 1-30, 1-5, 5-10, 10-15, 15-20, 20-25, or 25-30 aa insertions, deletions, and/or substitutions in addition to changes at variable residues listed therein). The HLA-E, F, or G heavy chain polypeptide sequence of a T-Cell-MP may comprise a cysteine at both position 84 and 139.

### (v) Mouse H2K

[0263] A MHC Class I heavy chain polypeptide of a T-Cell-MP or a T-Cell-MP-epitope conjugate may comprise an aa sequence of MOUSE H2K (SEQ ID NO:28) (MOUSE H2K in FIG. 3D), or a sequence having at least 75%, at least 80%, at least 85%, at least 90%, at least 95%, at least 98%, at least 99%, or 100% aa sequence identity to all or part (e.g., 50, 75, 100, 150, 200, 225, 250, or 260 contiguous aas) of that sequence (e.g., it may comprise 1-30, 1-5, 5-10, 10-15, 15-20, 20-25, or 25-30 aa insertions, deletions, and/or substitutions). In an embodiment, where the MOUSE H2K heavy chain polypeptide of a T-Cell-MP has less than 100% identity to the sequence labeled MOUSE H2K in FIG. 3D, it may comprise a substitution at one or more of positions 84 and/or139 selected from: a tyrosine to alanine at position 84 (Y84A); a tyrosine to cysteine at position 84 (Y84C); and an alanine to cysteine at position 139 (A139C). The mouse H2K heavy chain polypeptide sequence of a T-Cell-MP may comprise Y84C and A139C substitutions that may form a disulfide bond.

### (vi) The Effect of Amino Acid Substitutions in MHC Polypeptides on T-Cell-MPs

### (a) Substitutions at Positions 84 and 139

[0264] Substitution of position 84 of the MHC H chain (see FIG. 3I), particularly when it is a tyrosine residue, with a small amino acid such as alanine (Y84A) tends to open one end of the MHC binding pocket, allowing a linker (e.g., attached to a peptide epitope) to “thread” through the end of the pocket, and accordingly, permits a greater variation in the size of the epitope (e.g., longer peptides bearing epitope sequences) that can fit into the MHC pocket and be presented by the T-Cell-MP. Alternatively, the MHC-H (e.g., HLA-heavy chain) of a T-Cell-MP may be substituted with cysteines to form an intrachain disulfide bond between a cysteine substituted into the carboxyl end portion of the α1 helix and a cysteine in the amino end portion of the α2-1 helix (e.g., amino acids 84 and 139). Such disulfide bonds stabilize the MHC-H polypeptide sequence of a T-Cell-MP, and permit its translation, cellular processing, and excretion from eukaryotic cells in the absence of a bound peptide epitope (or null peptide). Any combination of substitutions provided in the table provide below at residues 84 and 130 may be combined with any combination of substitutions in the epitope binding cleft, such as those described at positions 116 and 167.

### (b) Substitutions at Positions 116 and 167

[0265] Any MHC Class I heavy chain sequences (including those disclosed above for: the HLA-A*0101; HLA-A*0201; HLA-A*1101; HLA-A*2402; HLA-A*3303; HLA-B; HLA-C; Mouse H2K, or any of the other HLA-A, B, C, E, F, and/or G sequence disclosed herein) may further comprise a cysteine substitution at position 116 (e.g., Y116C) or at position 167.

[0266] As with aa position 84 substitutions that open one end of the MHC-H binding pocket (e.g., Y84A or its equivalent), substitution of an alanine or glycine at position 167 (e.g., a W167A substitution or its equivalent) opens the other end of the MHC binding pocket, creating a groove that permits greater variation (e.g., longer length) of the peptide epitopes that may be presented by the T-Cell-MP-epitope conjugates. Substitutions at positions 84 and/or 167, or their equivalent (e.g., Y84A in combination with W167A or W167G) may be used in combination to modify the binding pocket of MHC-H chains. A cysteine substitution at positions 116 (e.g., Y116C) and/or 167 (e.g., W167C) may be used separately or in combination to anchor epitopes (e.g., peptide epitopes) in one or two locations (e.g., the ends of the epitope containing peptide). Substitutions at positions 116 and/or 167 may be combined with substitutions including those at positions 84 and/or 139 described above.

[0267] The Table below lists some MHC heavy chain sequence modifications that may be incorporated into a T-Cell-MPs.

Some Combinations of MHC Class 1 Heavy Chain Sequence Modifications that May be Incorporated into a T-Cell-MP or its Epitope Conjugate

| | HLA Heavy Chain | | | |
|---|---|---|---|---|
| | Sequence | Sequence | Substitutions | Substitutions |
| | From | Identity | at aa positions | at positions |
| Entry | FIGS. 3D-H | Range [symbol] | 84 and/or 139 | 116 and/or 167 |
| 1 | HLA-A | 75%-99.8%, 80%-99.8%, 85%-99.8%, | None; Y84C; Y84A; | None; Y116C; |
| | Consensus | 90%-99.8%, 95%-99.8%, 98%-99.8%, or | A139C; or (Y84C & | W167A; W167C; or |
| | FIG. 3E | 99%-99.8%; or 1-25, 1-5, 5-10, 10-15, 15- | A139C) | (Y116C & |
| | | 20, or 20-25 aa insertions, deletions, | | W167C) |
| | | and/or substitutions (not counting variable | | |
| | | residues) | | |
| 2 | A*0101, A*0201, | 75%-99.8%, 80%-99.8%, 85%-99.8%, | None; Y84C; Y84A; | None; Y116C; |
| | A*0301, A*1101, | 90%-99.8%, 95%-99.8%, 98%-99.8%, or | A139C; or (Y84C & | W167A; W167C; or |
| | A*2402, A*2301, | 99%-99.8%; or 1-25, 1-5, 5-10, 10-15, 15- | A139C) | (Y116C & |
| | A*2402, A*2407, | 20, or 20-25 aa insertions, deletions, and/or | | W167C) |
| | A*3303, or A*3401 | substitutions | | |
| 3 | HLA-B | 75%-99.8%, 80%-99.8%, 85%-99.8%, | None; Y84C; Y84A; | None; Y116C; |
| | Consensus | 90%-99.8%, 95%-99.8%, 98%-99.8%, or | A139C; or (Y84C & | W167A; W167C; or |
| | FIG. 3F | 99%-99.8%; or 1-25, 1-5, 5-10, 10-15, 15- | A139C) | (Y116C & |
| | | 20, or 20-25 aa insertions, deletions, and/or | | W167C) |
| | | substitutions (not counting variable | | |
| | | residues) | | |
| 4 | B*0702, B*0801, | 75%-99.8%, 80%-99.8%, 85%-99.8%, | None; Y84C; Y84A; | None; Y116C; |
| | B*1502, B*3501, | 90%-99.8%, 95%-99.8%, 98%-99.8%, or | A139C; or (Y84C & | W167A; W167C; or |
| | B*3802, B*4001, | 99%-99.8%; or 1-25, 1-5, 5-10, 10-15, 15- | A139C) | (Y116C & |
| | B*4402, B*4403, | 20, or 20-25 aa insertions, deletions, and/or | | W167C) |
| | B*4601, B*5301, or | substitutions | | |
| | B*5801 | | | |
| 5 | HLA-C | 75%-99.8%, 80%-99.8%, 85%-99.8%, | None; Y84C; Y84A; | None; Y116C; |
| | Consensus | 90%-99.8%, 95%-99.8%, 98%-99.8%, or | A139C; or (Y84C & | W167A; W167C; or |
| | FIG. 3G | 99%-99.8%; or 1-25, 1-5, 5-10, 10-15, 15- | A139C) | (Y116C & |
| | | 20, or 20-25 aa insertions, deletions, and/or | | W167C) |
| | | substitutions (not counting variable | | |
| | | residues) | | |
| 6 | C*0102, C*0303, | 75%-99.8%, 80%-99.8%, 85%-99.8%, | None; Y84C; Y84A; | None; Y116C; |
| | C*0304, C*0401, | 90%-99.8%, 95%-99.8%, 98%-99.8%, or | A139C; or (Y84C & | W167A; W167C; or |
| | C*0602, C*0701, | 99%-99.8%; or 1-25, 1-5, 5-10, 10-15, 15- | A139C) | (Y116C & |
| | C*702, C*0801, or | 20, or 20-25 aa insertions, deletions, and/or | | W167C) |
| | C*1502 | substitutions | | |
| 7 | HLA-E, F, or G | 75%-99.8%, 80%-99.8%, 85%-99.8%, | None; Y84C; Y84A; | None; Y116C; |
| | Consensus | 90%-99.8%, 95%-99.8%, 98%-99.8%, or | A139C; or (Y84C & | W167A; W167C; or |
| | FIG. 3H | 99%-99.8%; or 1-25, 1-5, 5-10, 10-15, 15- | A139C) | (Y116C & |
| | | 20, or 20-25 aa insertions, deletions, and/or | | W167C) |
| | | substitutions (not counting variable | | |
| | | residues) | | |
| 8 | MOUSE H2K | 75%-99.8%, 80%-99.8%, 85%-99.8%, | None; Y84C; Y84A; | None; Y116C; |
| | | 90%-99.8%, 95%-99.8%, 98%-99.8%, or | A139C; or (Y84C & | W167A; W167C; or |
| | | 99%-99.8%; or 1-25, 1-5, 5-10, 10-15, 15- | A139C) | (Y116C & |
| | | 20, or 20-25 aa insertions, deletions, and/or | | W167C) |
| | | substitutions | | |

[symbol]

The Sequence Identity Range is the permissible range in sequence identity of a MHC-H polypeptide sequence incorporated into a T-Cell-MP relative to the corresponding portion of the sequences listed in FIG. 3D-3H not counting the variable residues when the consensus sequences are used for the comparison.

b. MHC Class I β2-Microglobins and Combinations with MHC-H Polypeptides

[0268] A β2M polypeptide of a T-Cell-MP can be a human β2M polypeptide, a non-human primate β2M polypeptide, a murine β2M polypeptide, and the like. In some instances, a β2M polypeptide comprises an aa sequence having at least 75%, at least 80%, at least 85%, at least 90%, at least 95%, at least 98%, at least 99%, or 100% aa sequence identity to a β2M aa sequence (e.g., a mature β2M sequence) depicted in FIG. 4. The β2M polypeptide of a T-Cell-MP may comprise an aa sequence having at least 75%, at least 80%, at least 85%, at least 90%, at least 95%, at least 98%, at least 99%, or 100% aa sequence identity to aas 21 to 119 of a β2M aa sequence depicted in FIG. 4, which may include a cysteine or other aa substitution or insertion as a chemical conjugation site for epitope attachment (e.g., and E44C substitution) when the identity is less than 100%. Chemical conjugation sites may be located at, for example, solvent accessible locations in the β2M polypeptide sequence.

[0269] The β2M polypeptide sequence of a T-Cell-MP may have at least 90% (e.g., at least 95% or at least 98%) or 100% sequence identity to at least 70 (e.g., at least 80, at least 90, at least 96, at least 97, at least 98) or all contiguous aas of a mature human β2M polypeptide (e.g., aas 21-119 of NCBI accession number NP_004039.1 provided in FIG. 4). By way of example, a β2M polypeptide sequence of a T-Cell-MP may have up to six (e.g., 1, 2, 3, 4, 5, or 6) aa substitutions within an aa segment of at least 70 (e.g., at least 80, at least 90, at least 96, at least 97, or at least 98) or all contiguous aas of a mature human β2M polypeptide (e.g., aas 21-119 of NCBI accession number NP_004039.1 provided in FIG. 4), and may comprise the chemical conjugation site for attachment of an epitope (e.g., an E44C substitution in the mature peptide). As noted above, in such β2M polypeptide sequences the chemical conjugation sites of epitopes may be located at a variety of locations including solvent accessible aa positions. For example, a cysteine or other amino acid substitution or insertion at a solvent accessible amino acid position can provide a chemical conjugation site for direct or indirect (e.g., through a peptide linker) attachment of an epitope.

[0270] Some solvent accessible positions of mature β2M polypeptides lacking their leader sequence include aa positions 2, 14, 16, 34, 36, 44, 45, 47, 48, 50, 58, 74, 77, 85, 88, 89, 91, 94, and 98 (Gln 2, Pro 14, Glu 16, Asp 34, Glu 36, Glu 44, Arg 45, Glu 47, Arg 48, Glu 50, Lys 58, Glu 74, Glu 77, Val 85, Ser 88, Gln 89, Lys 91, Lys 94, and Asp 98) of the mature peptide from NP_004039.1, or their corresponding amino acids in other β2M sequences (see the sequence alignment in FIG. 4). The solvent accessible locations for chemical conjugation sites (e.g., a cysteine or another reactive aa substitution) may be selected from positions 2, 44, 50, 77, 85, 88, 91, or 98 of a mature β2M polypeptide sequence such as NP_004039.1, or the corresponding aa positions in other β2M sequences such as those in FIG. 4. The solvent accessible locations for chemical conjugation sites (e.g., a cysteine or another reactive aa substitution) may also be selected from positions 2, 44, 50, or 98 of a mature β2M polypeptide sequence such as NP_004039.1, or the corresponding aa positions in other β2M sequences such as those in FIG. 4. The solvent accessible locations for chemical conjugation sites (e.g., a cysteine or another reactive aa substitution) may be selected from positions 2 or 44 (Glu 2 or Glu 44) of a mature β2M polypeptide sequence such as NP_004039.1, or the corresponding aa positions in other β2M sequences such as those in FIG. 4.

[0271] A β2M polypeptide sequence may comprise a single cysteine substituted into a wt. β2M polypeptide (e.g., a β2M sequence in FIG. 4). Such cysteine residues, when present in a T-Cell-MP polypeptide, can act as a chemical conjugation site for the covalent coupling of an epitope (either directly or indirectly through a linker). The covalent attachment may be in the form of a bond made to a reactive group in or attached to the epitope, such as a maleimide group incorporated into the epitope or a linker attached to the peptide epitope, or in the form of a disulfide bond. For example, in some cases, one of amino acids 43, 44, or 45 of the mature β2M lacking its signal sequence (residues 63, 64, and 65 of the unprocessed proteins as shown with their signal sequences in FIG. 4) may be substituted with a cysteine residue. The aa of β2M substituted with a cysteine may be at position 44 of a mature β2M aa sequence. For example, an E44C substitution of the mature human β2M protein NP_004039.1 has the sequence IQRTPKIQVYSRHPAENGKSNFLNCYVSGFHPSDIEVDLLKNGCRIEKVEHSDLSFSKDWSFYLLYY TEFTPTEKDEYACRVNHVTLSQPKIVKWDRDM (SEQ ID NO:2092), with the cysteine at position 44 bolded and italicized. A corresponding aa substitution in other β2M sequences, such as those in FIG. 4 may be used for a conjugation site. Alternatively, the aa position substituted with a cysteine may be position 2 (e.g., a Q44C substitution of the mature human protein NP_004039.1 or a corresponding aa substitution in a β2M sequence such as those in FIG. 4).

c. Some Combinations of Substitutions in the MHC-H and the β2M Polypeptide Sequences

[0272] Separately, or in addition to, any cysteine residues inserted into the MHC-H or β2M polypeptide sequence of a T-Cell-MP that may function as a chemical conjugation site for an epitope or a payload (e.g., an E44C substitution in a β2M polypeptide sequence that provides a chemical conjugation site for an epitope), a T-Cell-MP may comprise an intrachain disulfide bond between a cysteine substituted into the carboxyl end portion of the α1 helix and a cysteine in the amino end portion of the α2-1 helix (e.g., amino acids at aa positions 84 and 139, such as Y84C and A139C). The carboxyl end portion of the α1 helix is from about aa position 79 to about aa position 89 and the amino end portion of the α2-1 helix is from about aa position 134 to about aa position 144 of the MHC-H chain (the aa positions are determined based on the sequence of the heavy chains without their leader sequence (see, e.g., FIGS. 3D-3H). Accordingly, a disulfide bond may be between a cysteine located at positions 83, 84, or 85 and a cysteine located at any of positions 138, 139 or 140 of the MHC-H polypeptide sequence. For example, in a T-Cell-MP a disulfide bond may be formed between a cysteine inserted at position 84 and a cysteine inserted at any of positions 138, 139 or 140 of the MHC-H polypeptide sequence. In one aspect, the MHC-H intrachain disulfide bond is between cysteines substituted at positions 84 and 139 of any of the heavy chain sequences set forth in FIGS. 3D-3H.

[0273] A T-Cell-MP may comprise a combination of: (i) a mature β2M polypeptide sequence having at least 90% (e.g., at least 95% or at least 98%) sequence identity to at least 70 (e.g., at least 80, at least 90, at least 96, at least 97, at least 98 or all) of aas 21-119 of NP_004039.1 with an E44C (or another cysteine substitution) as a chemical conjugation site for an epitope; and (ii) an HLA Class I heavy chain polypeptide sequence having at least 90% sequence identity (e.g., at least 95%, at least 98%, or 100% sequence identity) excluding variable aa clusters (aac) 1-4 to: GSHSMRYFFTSVSRPGRGEPRFIAVGYVDDTQFVRFDSDAASQRMEPRAPWIEQEGPEYWDGETRKVKAH SQTHRVDL(aa cluster 1){C}(aa cluster 2)AGSHTVQRMYGCDVGSDWRFLRGYHQYAYDGKDYIALKEDLRSW(aa cluster 3){C}(aa cluster 4)HKWEAAHVAEQLRAYLEGTCVEWLRRYLENGKETLQRTDAPKTHMTHHAVSDHEATLRC WALSFYPAEITLTWQRDGEDQTQDTELVETRPAGDGTFQKWAAVVVPSGQEQRYTCHVQHEGLPKPLTLRWEP (SEQ ID NO:84); where the cysteine residues indicated as {C} form a disulfide bond between the α1 and α2-1 helices.

[0274] Each occurrence of aa cluster 1, aa cluster 2, aa cluster 3, aa cluster 4, aa cluster 5, and aa cluster 6 is independently selected to be 1-5 aa residues, wherein the aa residues are each selected independently from i) any naturally occurring (proteinogenic) aa or ii) any naturally occurring aa except proline or glycine. The MHC-H polypeptide sequence may be an HLA-A chain, wherein:
[0275] aa cluster 1 may be the amino acid sequence GTLRG (SEQ ID NO:85) or that sequence with one or two aas deleted or substituted with other naturally occurring aas (e.g., L replaced by I, V, A or F);
[0276] aa cluster 2 may be the amino acid sequence YNQSE (SEQ ID NO:86) or that sequence with one or two aas deleted or substituted with other naturally occurring aas (e.g., N replaced by Q, Q replaced by N, and/or E replaced by D);
[0277] aa cluster 3 may be the amino acid sequence TAADM (SEQ ID NO:87) or that sequence with one or two aas deleted or substituted with other naturally occurring aas (e.g., T replaced by S, A replaced by G, D replaced by E, and/or M replaced by L, V, or); and/or aa cluster 4 may be the amino acid sequence AQTTK (SEQ ID NO: 88) or that sequence with one or two aas deleted or substituted with other naturally occurring aas (e.g., A replaced by G, Q replaced by N, or T replaced by S, and or K replaced by R or Q).

[0278] As noted above, any of the MHC-H intrachain disulfide bonds, including a disulfide bond between cysteines at 84 and 139 (a Y84C and A139C disulfide), may be combined with substitutions that permit incorporation of a peptide epitope into a T-Cell-MP. Accordingly, the present disclosure includes and provides for T-Cell-MPs and their higher order complexes (e.g., duplexes) comprising one or more T-Cell-MP polypeptides having a MHC-H polypeptide sequence with an intrachain Y84C A139C disulfide bond and an E44C substitution in the β2M polypeptide sequence. T-Cell-MPs and their higher order complexes (e.g., duplexes) may comprise: (i) a mature β2M polypeptide sequence with an E44C substitution having at least 90% (e.g., at least 95% or at least 98%) sequence identity to at least 70 (e.g., at least 80, 90, 96, 97, 98 or all) of aas 21-119 of any one of NP_004039.1, NP_001009066.1, NP_001040602.1, NP_776318.1, or NP_033865.2 (SEQ ID NOs: 61 to 65, see FIG. 4); and (ii) a MHC-H sequence with Y84C and A139C substitutions (that form a disulfide bond) may have at least 85% (e.g., at least 90%, at least 95% or at least 98%) or 100% sequence identity to at least 200 (e.g., at least 225, at least 250, at least 260, or at least 275) contiguous aas of the α1, α2, and α3 domains an HLA-A, -B, -C, -E, -F, or -G sequences in FIGS. 3D-3H. The MHC-H polypeptide sequence may be an HLA-A*0101, HLA-A*0201, HLA-A*1101, HLA-A*2402, HLA-A*3303, or HLA-A*3401polypeptide sequence having Y84C and A139C substitutions (see FIG. 3E). The MHC-H polypeptide sequence may be an HLA-B*0702, HLA-B*0801, HLA-B*1502, B27 (subtypes HLA-B*2701-2759), HLA-B*3802, HLA-B*4001, HLA-B*4601, or HLA-B*5301 polypeptide sequence having Y84C and A139C substitutions (see, e.g., FIG. 3F). The MHC-H polypeptide sequence may be an HLA-C*0102, HLA-C*0303, HLA-C*0304, HLA-C*0401, HLA-C*0602, HLA-C*0701, HLA-C*0702, HLA-C*0801, or HLA-C*1502 polypeptide sequence having Y84C and A139C substitutions (see, e.g., FIG. 3G).

### 4 Scaffold Polypeptides

[0279] T-Cell-MPs and T-Cell-MP-epitope conjugates may comprise an Ig heavy chain constant region (“Ig Fc” or “Fc”) polypeptide, or may comprise another suitable scaffold polypeptide. Where scaffold polypeptide sequences are identical and pair or multimerize (e.g., some Ig Fc sequences or leucine zipper sequences), they can form symmetrical pairs or multimers (e.g., homodimers, see e.g., FIG. 9 with an Fc scaffold). In contrast, where an asymmetric pairing between two T-Cell-MP molecules is desired (e.g., to produce a duplex T-Cell-MP with each bearing one or more different MODs), the scaffold polypeptides present in the T-Cell-MP may comprise interspecific binding sequences. Interspecific binding sequences are non-identical polypeptide sequences that selectively interact with their specific complementary counterpart sequence to form asymmetric pairs (heterodimers, see e.g., FIG. 10 with an interspecific Fc scaffold). Interspecific binding sequences may in some instances form some amount of homodimers, but preferentially dimerize by binding more strongly) with their counterpart interspecific binding sequence. Accordingly, specific heterodimers tend to be formed when an interspecific dimerization sequence and its counterpart interspecific binding sequence are incorporated into a pair of polypeptides. By way of example, where an interspecific dimerization sequence and its counterpart are incorporated into a pair of polypeptides they may selectively form greater than 70%, 80%, 90%, 95%, 98% or 99% heterodimers when an equimolar mixture of the polypeptides are combined. The remainder of the polypeptides may be present as monomers or homodimers, which may be separated from the heterodimer. Moreover, because interspecific sequences are selective for their counterpart sequence, they can limit the interaction with other proteins expressed by cells (e.g., in culture or in a subject) particularly where the interspecific sequences are not naturally occurring or are variants of naturally occurring protein sequences.

[0280] Scaffold polypeptide sequences generally may be less than 300 aa (e.g., about 100 to about 300 aa). Scaffold polypeptide sequences may be less than 250 aa (e.g., about 75 to about 250 aa). Scaffold polypeptide sequences may be less than 200 aa (e.g., about 60 to about 200 aa). Scaffold polypeptide sequences may be less than 150 aa (e.g., about 50 to about 150 aa).

[0281] Scaffold polypeptide sequences include, but are not limited to, interspecific and non-interspecific Ig Fc polypeptide sequences, however, polypeptide sequences other than Ig Fc polypeptide sequences (non-Ig sequences) may be used as scaffolds.

a. Non-Immunoglobulin Fc Scaffold Polypeptides

[0282] Non-Ig Fc scaffold polypeptides include, but are not limited to: albumin, XTEN (extended recombinant); transferrin; Fc receptor, elastin-like; albumin-binding; silk-like (see, e.g., Valluzzi et al. (2002) Philos Trans R Soc Lond B Biol Sci. 357:165); a silk-elastin-like (SELP; see, e.g., Megeed et al. (2002) Adv Drug Deliv Rev. 54:1075) polypeptides; and the like. Suitable XTEN polypeptides include, e.g., those disclosed in WO 2009/023270, WO 2010/091122, WO 2007/103515, US 2010/0189682, and US 2009/0092582; see, also, Schellenberger et al. (2009) Nat Biotechnol. 27:1186). Suitable albumin polypeptides include, e.g., human serum albumin. Suitable elastin-like polypeptides are described, for example, in Hassouneh et al. (2012) Methods Enzymol. 502:215.

[0283] Other non-Ig Fc scaffold polypeptide sequences include but are not limited to: polypeptides of the collectin family (e.g., ACRP30 or ACRP30-like proteins) that contain collagen domains consisting of collagen repeats Gly-Xaa-Yaa and/or Gly-Xaa-Pro (which may be repeated from 10-40 times); coiled-coil domains; leucine-zipper domains; Fos/Jun binding pairs; Ig CH1 and light chain constant region C_{L} sequences (Ig CH1/C_{L} pairs such as a Ig CH1 sequence paired with a Ig C_{L} κ or C_{L} λ light chain constant region sequence).

[0284] Non-Ig Fc scaffold polypeptides can be interspecific or non-interspecific in nature. For example, both Fos/Jun binding pairs and Ig CH1 polypeptide sequences and light chain constant region C_{L} sequences form interspecific binding pairs. Coiled-coil sequences, including leucine zipper sequences, can be either interspecific leucine zipper or non-interspecific leucine zipper sequences. See e.g., Zeng et al., (1997) PNAS (USA) 94:3673-3678; and Li et al., (2012), Nature Comms. 3:662.

[0285] The scaffold polypeptides of a duplex T-Cell-MP may each comprise a leucine zipper polypeptide sequence. The leucine zipper polypeptides bind to one another to form a dimer. Non-limiting examples of leucine-zipper polypeptides include a peptide comprising any one of the following aa sequences: RMKQIEDKIEEILSKIYHIE NEIARIKKLIGER (SEQ ID NO:89); LSSIEKKQEEQTSW LIWISNELTLIRNELAQS (SEQ ID NO:90); LSSIEKKLEEIT SQLIQISNELTLIRNELAQ (SEQ ID NO:91); LSSIEKKLEEITSQLIQIRNELTLIRNELAQ (SEQ ID NO:92); LSSIEKKLE EITSQLQQIRN ELTLIRNELAQ (SEQ ID NO:93); LSSLEKKLEELTSQLIQLRNELTLLRNELAQ (SEQ ID NO:94); ISSLEKKIEELTSQIQQLRNEITLLRNEIAQ (SEQ ID NO:95). In some cases, a leucine zipper polypeptide comprises the following aa sequence: LEIEAAFLERENTALETRVAELRQRVQRLRNRV SQYRTRYGPLGGGK (SEQ ID NO:96). Additional leucine-zipper polypeptides are known in the art, a number of which are suitable for use as scaffold polypeptide sequences.

[0286] The scaffold polypeptide of a T-Cell-MP may comprise a coiled-coil polypeptide sequence that forms a dimer. Non-limiting examples of coiled-coil polypeptides include, for example, a peptide of any one of the following aa sequences: LKSVENRLAVVENQLKTVIEELKTVKDLLSN (SEQ ID NO:97); LARIEEKLKTIKAQLSEIASTLN MIREQLAQ (SEQ ID NO:98); VSRLEEKVKTLKSQVTELASTVS LLREQVAQ (SEQ ID NO:99); IQSEKKIEDISSLIG QIQSEITLIRNEIAQ (SEQ ID NO:100); and LMSLEKKLEELTQTLMQLQNELSMLKNELAQ (SEQ ID NO:101).

[0287] The T-Cell-MPs of a T cell MP duplex may comprise a pair of scaffold polypeptide sequences that each comprise at least one cysteine residue that can form a disulfide bond permitting homodimerization or heterodimerization of those polypeptides stabilized by an interchain disulfide bond between the cysteine residues. Examples of such aa sequences include: VDLEGSTSNGRQCAGIRL (SEQ ID NO:102); EDDVTTTEELAPALVPPP KGTCAGWMA (SEQ ID NO:103); and GHDQETTTQ GPGVLLPLPKGACTGQMA (SEQ ID NO:104).

[0288] Some scaffold polypeptide sequences permit formation of T-Cell-MP complexes of higher order than duplexes, such as triplexes, tetraplexes, pentaplexes or hexaplexes. Such aa sequences include, but are not limited to, IgM constant regions (discussed below). Collagen domains, which form trimers, can also be employed. Collagen domains may comprise the three aa sequence Gly-Xaa-Xaa and/or GlyXaaYaa, where Xaa and Yaa are independently any aa, with the sequence appear or are repeated multiple times (e.g., from 10 to 40 times). In Gly-Xaa-Yaa sequences, Xaa and Yaa are frequently proline and hydroxyproline respectively in greater than 25%, 50%, 75%, 80% 90% or 95% of the Gly-Xaa-Yaa occurrences, or in each of the Gly-Xaa-Yaa occurrences. In some cases, a collagen domain comprises the sequence Gly-Xaa-Pro repeated from 10 to 40 times. A collagen oligomerization peptide can comprise the following aa sequence: VTAFSNMDDMLQKAHLVIEGTFIYLRDSTEFFIRVRDGWK KLQLGELIPIPADSPPPPALSSNP (SEQ ID NO:105).

b. Immunoglobulin Fc Scaffold Polypeptides

### (i) Non-Interspecific Immunoglobulin Fc Scaffold Polypeptides

[0289] The scaffold polypeptide sequences of a T-Cell-MP or its corresponding T-Cell-MP-epitope conjugate may comprise an immunoglobulin (Ig) Fc polypeptide. The Fc polypeptide of a T-Cell-MP or T-Cell-MP-epitope conjugate can be, for example, from an IgA, IgD, IgE, IgG, or IgM, any of which may be a human polypeptide sequence, a humanized polypeptide sequence, a Fc region polypeptide of a synthetic heavy chain constant region, or a consensus heavy chain constant region. In embodiments, the Fc polypeptide can be from a human IgG1 Fc, a human IgG2 Fc, a human IgG3 Fc, a human IgG4 Fc, a human IgA Fc, a human IgD Fc, a human IgE Fc, a human IgM Fc, etc. An Fc polypeptide may comprise an aa sequence having at least about 85% (e.g., at least about 90%; at least about 95%; at least about 98%; or at least about 99%), or 100% aa sequence identity to at least 175 contiguous aas (e.g., at least 200, or at least 210 contiguous aas), or all aas of an aa sequence of a Fc region depicted in FIGS. 2A-2H. Such Ig sequences can interact forming a duplex or higher order structure from T-Cell-MP molecules. In some instances, the Fc scaffold polypeptide sequences include naturally occurring cysteine residues (or non-naturally occurring cysteine residues provided by protein engineering) that are capable of forming interchain disulfide bonds covalently linking two T-Cell-MP polypeptides together. Unless stated otherwise, the Fc polypeptides used in the T-Cell-MPs and their epitope conjugates do not comprise a transmembrane anchoring domain or a portion thereof sufficient to anchor the T-Cell-MP to a cell membrane.

[0290] An Ig Fc sequence, or any one or more of the CH1, CH2, and CH3 domains present in a T-Cell-MP may have at least about 80%, at least about 90%, at least about 95%, at least about 98%, at least about 99%, or 100% aa sequence identity to an IgFc polypeptide sequence provided in any of FIGS. 2A-2H. The Ig Fc may comprise a sequence having at least about 95%, at least about 98%, aa sequence identity to sequence provided in any of FIGS. 2A-2H. In those instances where the IgFc region is located at the C-terminus of the T-Cell-MP, the C-terminal lysine provided in some of the sequences provided in FIGS. 2A-2H (e.g., the IgG sequences in FIGS. 2D, 2E, 2F, and 2G) may be removed during cellular processing of MAPPs, and may not be present on some or all of the T-Cell-MP molecules as expressed. See, e.g., van den Bremer et al. (2015) mAbs 7:4; and Sissolak et al. (2019) J. Industrial Microbiol. & Biotechnol. 46:1167. The terminal lysine may also be intentionally removed, thereby avoiding the clipping in cellular processing to insure protein homogeneity.

[0291] Most Ig Fc scaffold polypeptides, particularly those comprising only or largely wt. sequences, may spontaneously link together via disulfide bonds to form homodimers resulting in duplex T-Cell-MPs. For example, IgG1 cysteine residues (e.g., cysteine residues at positions 6 and 9 of SEQ ID NO:4, or the corresponding cysteine residues of other IgG1 sequences) may each form an interchain disulfide bond covalently linking a pair of IgG1 sequences by two disulfide bonds. In the case of IgM heavy chain constant regions, in the presences of a J-chains, higher order complexes may be formed. Scaffold polypeptides may comprise an aa sequence having 100% aa sequence identity to the wt. human IgG1 Fc polypeptide depicted in FIG. 2D. A scaffold polypeptide may comprise an aa sequence having at least about 85% (e.g., at least about 90%; at least about 95%; at least about 98%; or at least about 99%) or 100% aa sequence identity to at least 175 contiguous aas (e.g., at least 200, or at least 210 contiguous aas), or all aas, of the wt. human IgG1 Fc polypeptide depicted in FIG. 2D. Such scaffold sequences may include a substitution of N297 (N77 as numbered in FIG. 2D, SEQ ID NO:4) with an aa other than asparagine. In one case, N297 is substituted by alanine, (N297A). Substitutions at N297 lead to the removal of carbohydrate modifications and result antibody sequences with reduced complement component 1q (“C1q”) binding compared to the wt. protein, and accordingly a reduction in complement-dependent cytotoxicity (CDC). K322 (e.g., K322A) substitutions shows a substantial reduction in reduction in FcγR binding affinity and ADCC, with the C1q binding and CDC functions substantially or completely eliminated. Hezareh et al., (2001) J. Virol. 75:12161-168.

[0292] Amino acid L234 and other aas in the lower hinge region (e.g., aas 234 to 239, such as L235, G236, G237, P238, S239) which correspond to aas 14-19 of SEQ ID NO:8) of IgG are involved in binding to the Fc gamma receptor (FcγR), and accordingly, mutations at that location reduce binding to the receptor (relative to the wt. protein) and resulting in a reduction in antibody-dependent cellular cytotoxicity (ADCC). Hezareh et al., (2001) have demonstrated that the double mutant (L234A, L235A) does not effectively bind either FcγR or C1q, and both ADCC and CDC functions were substantially or completely abolished. A scaffold polypeptide with a substitution in the lower hinge region may comprise an aa sequence having at least about 85% (e.g., at least about 90%; at least about 95%; at least about 98%; or at least about 99%) aa sequence identity to at least 175 contiguous aas (e.g., at least 200, or at least 210 contiguous aas), or all aas, of the wt. human IgG1 Fc polypeptide depicted in FIG. 2D, that includes a substitution of L234 (L14 of the aa sequence depicted in FIG. 2D) with an aa other than leucine.

[0293] A scaffold polypeptide with a substitution in the lower hinge region may comprise an aa sequence having at least about 85% (e.g., at least about 90%; at least about 95%; at least about 98%; or at least about 99%) aa sequence identity to at least 175 contiguous aas (e.g., at least 200, or at least 210 contiguous aas), or all aas, of the wt. human IgG1 Fc polypeptide depicted in FIG. 2D, that includes a substitution of L235 (L15 of the aa sequence depicted in FIG. 2D) with an aa other than leucine. In some cases, the scaffold polypeptide present in a T-Cell-MP with substitutions in the lower hinge region includes L234A and L235A (“LALA”) substitutions (the positions corresponding to positions 14 and 15 of the wt. aa sequence depicted in FIG. 2D; see, e.g., SEQ ID NO:8).

[0294] A scaffold polypeptide with a substitution in the lower hinge region may comprise an aa sequence having at least about 85% (e.g., at least about 90%; at least about 95%; at least about 98%; or at least about 99%) aa sequence identity to at least 175 contiguous aas (e.g., at least 200, or at least 210 contiguous aas), or all aas of the wt. human IgG1 Fc polypeptide depicted in FIG. 2D, that includes a substitution of P331 (P111 of the aa sequence depicted in FIG. 2D) with an aa other than proline. Substitutions at P331, like those at N297, lead to reduced binding to C1q relative to the wt. protein, and thus a reduction in complement dependent cytotoxicity. In one embodiment, the substitution is a P331S substitution. In another embodiment, the substitution is a P331A substitution.

[0295] A scaffold polypeptide may comprise an aa sequence having at least about 85% (e.g., at least about 90%; at least about 95%; at least about 98%; or at least about 99%) aa sequence identity to at least 175 contiguous aas (e.g., at least 200, or at least 210 contiguous aas), or all aas, of the wt. human IgG1 Fc polypeptide depicted in FIG. 2D, and include substitutions of D270, K322, and/or P329 (corresponding to D50, K102, and P109 of SEQ ID NO:4 in FIG. 2D) that reduce binding to C1q protein relative to the wt. proteins.

[0296] A scaffold polypeptide may comprise an aa sequence having at least about 85% (e.g., at least about 90%; at least about 95%; at least about 98%; or at least about 99%) aa sequence identity to at least 175 contiguous aas (e.g., at least 200, or at least 210 contiguous aas), or all aas, of the wt. human IgG1 Fc polypeptide depicted in FIG. 2D, including substitutions at L234 and/or L235 (L14 and/or L15 of the aa sequence depicted in FIG. 2D) with aas other than leucine (such as L234A and L235A substitutions), and a substitution of P331 (P111 of the aa sequence depicted in FIG. 2D) with an aa other than proline such as P331S. In one instance, a scaffold polypeptide present in a T-Cell-MP comprises the “Triple Mutant” aa sequence (SEQ ID NO:6) depicted in FIG. 2D (human IgG1 Fc) having L234F, L235E, and P331S substitutions (corresponding to aa positions 14, 15, and 111 of the aa sequence depicted in FIG. 2D).

[0297] The scaffold Fc polypeptide of a T-Cell-MP may comprise an aa sequence having at least about 85% (e.g., at least about 90%; at least about 95%; at least about 98%; or at least about 99%), or 100% aa, sequence identity to at least 175 contiguous aas (e.g., at least 200, or at least 210 contiguous aas), or all aas, of a human IgG2 Fc polypeptide depicted in FIG. 2E. The scaffold Fc polypeptide of a T-Cell-MP may comprise an aa sequence having at least about 85%, (e.g., at least about 90%; at least about 95%; at least about 98%; or at least about 99%), or 100% aa, sequence identity to at least 175 contiguous aas (e.g., at least 200, or at least 210 contiguous aas), or all aas, of a human IgG3 Fc polypeptide depicted in FIG. 2F. The scaffold Fc polypeptide of a T-Cell-MP may comprise an aa sequence having at least about 85% (e.g., at least about 90%; at least about 95%; at least about 98%; or at least about 99%), or 100% aa, sequence identity to at least 175 contiguous aas (e.g., at least 200, or at least 210 contiguous aas), or all aas, of a human IgG4 Fc polypeptide depicted in FIG. 2G. The scaffold Fc polypeptide of a T-Cell-MP may comprise an aa sequence having at least about 85% (e.g., at least about 90%; at least about 95%; at least about 98%; or at least about 99%), or 100% aa sequence identity to at least 175 contiguous aas (e.g., at least 200, or at least 210 contiguous aas e.g., aas 99 to 327 or 111 to 327), or all of the GenBank P01861 human IgG4 Fc polypeptide depicted in FIG. 2G.

[0298] The scaffold Fc polypeptide of a T-Cell-MP may comprise IgM heavy chain constant regions (see e.g., FIG. 2H), which forms hexamer, or pentamers (particularly when combined with a mature j-chain peptide lacking a signal sequence such as that provided in FIG. 2I.

### (ii) Interspecific Immunoglobulin Fc Scaffold Polypeptides

[0299] Where an asymmetric pairing between two T-Cell-MP molecules is desired (e.g., to produce a duplex T-Cell-MP with different MODs), a scaffold polypeptide present in a T-Cell-MP may comprise, consist essentially of, or consist of an interspecific Ig Fc polypeptides) sequence variants. Such interspecific polypeptide sequences include, but are not limited to, knob-in-hole without (KiH) or with (KiHs-s) a stabilizing disulfide bond, HA-TF, ZW-1, 7.8.60, DD-KK, EW-RVT, EW-RVTs-s, and A107 sequences. One interspecific binding pair comprises a T366Y and Y407T mutant pair in the CH3 domain interface of IgG1, or the corresponding residues of other immunoglobulins. See Ridgway et al., Protein Engineering 9:7, 617-621 (1996). A second interspecific binding pair involves the formation of a knob by a T366W substitution, and a hole by the triple substitutions T366S, L368A and Y407V on the complementary Ig Fc sequence. See Xu et al. mAbs 7:1, 231-242 (2015). Another interspecific binding pair has a first Ig Fc polypeptide with Y349C, T366S, L368A, and Y407V substitutions and a second Ig Fc polypeptide with S354C, and T366W substitutions (disulfide bonds can form between the Y349C and the S354C). See e.g., Brinkmann and Konthermann, mAbs 9:2, 182-212 (2015). Ig Fc polypeptide sequences, either with or without knob-in-hole modifications, can be stabilized by the formation of disulfide bonds between the Ig Fc polypeptides (e.g., the hinge region disulfide bonds). Several interspecific binding sequences based upon Ig sequences are summarized in the table that follows (Table 1), with cross reference to the numbering of the aa positions as they appear in the wt. IgG1 sequence (SEQ ID NO:4) set forth in FIG. 2D shown in brackets “{ }”.

TABLE 1
Interspecific Ig sequences and their cognate counterpart interspecific sequences

| | Substitutions in the first | Substitutions in the second | |
|---|---|---|---|
| Interspecific | interspecific polypeptide | (counterpart) interspecific | |
| Pair Name | sequence | polypeptide sequence | Comments |
| KiH | T366W | T366S/L368A/Y407V | Hydrophobic/steric |
| | {T146W} | {T146S/L148A/Y187V} | complementarity |
| KiHs-s | T366W/S354C* | T366S/L368A/Y407V/Y349C | KiH + inter-CH3 |
| | {T146W/S134C*} | {T146S/L148A/Y187V/Y129C} | domain S—S bond |
| HA-TF | S364H/F405A | Y349T/T394F | Hydrophobic/steric |
| | {S144H/F185A} | {Y129T/T174F} | complementarity |
| ZW1 | T350V/L351Y/F405A/Y407V | T350V/T366L/K392L/T394W | Hydrophobic/steric |
| | {T130V/L131Y/F185A/Y187V} | {T130V/T146L/K172L/T174W} | complementarity |
| 7.8.60 | K360D/D399M/Y407A | E345R/Q347R/T366V/K409V | Hydrophobic/steric |
| | {K140D/D179M/Y187A} | {E125R/Q127R/T146V/K189V} | complementarity + |
| | | | electrostatic |
| | | | complementarity |
| DD-KK | K409D/K392D | D399K/E356K | Electrostatic |
| | {K189D/K172D} | {D179K/E136K} | complementarity |
| EW-RVT | K360E/K409W | Q347R/D399V/F405T | Hydrophobic/steric |
| | {K140E/K189W} | {Q127R/D179V/F185T} | complementarity & |
| | | | long-range |
| | | | electrostatic |
| | | | interaction |
| EW-RVTs-s | K360E/K409W/Y349C* | Q347R/D399V/F405T/S354C | EW-RVT + inter-CH3 |
| | {K140E/K189W/Y129C*} | {Q127R/D179V/F185T/S134C} | domain S—S bond |
| A107 | K370E/K409W | E357N/D399V/F405T | Hydrophobic/steric |
| | {K150E/K189W} | {E137N/D179V/F185T} | complementarity + |
| | | | hydrogen bonding |
| | | | complementarity |

Table 1 is modified from Ha et al., Frontiers in Immunol. 7: 1-16 (2016).
*aa forms a stabilizing disulfide bond.

[0300] In addition to the interspecific pairs of sequences in Table 1, scaffold polypeptides may include interspecific “SEED” sequences having 45 residues derived from IgA in an IgG1 CH3 domain of the interspecific sequence, and 57 residues derived from IgG1 in the IgA CH3 in its counterpart interspecific sequence. See Ha et al., Frontiers in Immunol. 7:1-16 (2016).

[0301] Interspecific Ig sequences my include substitutions described above for non-interspecific Ig sequences that inhibit binding either or both of the FcγR or C1q, and reduce or abolish ADCC and CDC function.

[0302] In an embodiment, a scaffold polypeptide found in a T-Cell-MP may comprise an interspecific binding sequence or its counterpart interspecific binding sequence selected from the group consisting of: knob-in-hole (KiH); knob-in-hole with a stabilizing disulfide (KiHs-s); HA-TF; ZW-1; 7.8.60; DD-KK; EW-RVT; EW-RVTs-s; A107; or SEED sequences.

[0303] In an embodiment, a T-Cell-MP comprises a scaffold polypeptide comprising an IgG1 sequence with a T146W KiH sequence substitution, and its counterpart interspecific binding partner polypeptide comprises an IgG1 sequence having T146W, L148A, and Y187V KiH sequence substitutions, where the scaffold polypeptides comprises a sequence having at least 85%, at least 90%, at least 95%, or at least 97% sequence identity to at least 100 (e.g., at least 125, 150, 170, 180, 190, 200, 210, 220, or all 227) contiguous aas of the wt. IgG1 of FIG. 2D. Scaffold polypeptides optionally comprise substitutions at one of more of: L234 and L235 (e.g., L234A/L235A “LALA” or L234F/L235E); N297 (e.g., N297A); P331 (e.g. P331S); L351 (e.g., L351K); T366 (e.g., T366S); P395 (e.g., P395V); F405 (e.g., F405R); Y407 (e.g., Y407A); and K409 (e.g., K409Y). Those substitutions appear at: L14 and L15 (e.g., L14A/L 15A “LALA” or L14F/L15E); N77 (e.g., N77A); P111 (e.g. P111S) L131 (e.g., L131K); T146 (e.g., T146S); P175 (e.g., P175V); F185 (e.g., F185R); Y187 (e.g., Y187A); and K189 (e.g., K189Y) in the wt. IgG1 sequence of FIG. 2D.

[0304] In an embodiment, a T-Cell-MP or duplex T-Cell-MP comprises a scaffold polypeptide comprising an IgG1 sequence with a T146W KiH sequence substitution, and its counterpart interspecific binding partner polypeptide comprises an IgG1 sequence having T146S, L148A, and Y187V KiH sequence substitutions, where the scaffold polypeptides comprise a sequence having at least 80%, at least 90%, at least 95%, or at least 97% sequence identity to at least 100 (e.g., at least 125, 150, 170, 180, 190, 200, 210, 220, or all 227) contiguous aas of the wt. IgG1 of FIG. 2D; where one or both (in the case of duplex T-Cell-MP) scaffold polypeptide sequence(s) may comprise additional substitutions such as L14 and/or L15 substitutions (e.g., “LALA” substitutions L234A and L235A), and/or N77 (N297 e.g., N297A or N297G).

[0305] In an embodiment, a T-Cell-MP or duplex T-Cell-MP comprises a scaffold polypeptide comprising an IgG1 sequence with a T146W and S134C KiHs-s substitutions, and its counterpart interspecific binding partner polypeptide comprises an IgG1 sequence having T146S, L148A, Y187V and Y129C KiHs-s substitutions, where the scaffold polypeptides comprise a sequence having at least 80%, at least 90%, at least 95%, or at least 97% sequence identity to at least 100 (e.g., at least 125, 150, 170, 180, 190, 200, 210, 220, or all 227) contiguous aas of the wt. IgG1 of FIG. 2D; where one or both (in the case of duplex T-Cell-MP) scaffold polypeptide sequence(s) sequences may comprise additional substitutions such as L14 and/or L15 substitutions (e.g., “LALA” substitutions L234A and L235A), and/or N77 (N297 e.g., N297A or N297G).

[0306] In an embodiment, a T-Cell-MP comprises a scaffold polypeptide comprising an IgG1 sequence with a S144H and F185A HA-TF substitutions, and its counterpart interspecific binding partner polypeptide comprises an IgG1 sequence having Y129T and T174F HA-TF substitutions, where the scaffold polypeptides comprise a sequence having at least 80%, at least 90%, at least 95%, or at least 97% sequence identity to at least 100 (e.g., at least 125, 150, 170, 180, 190, 200, 210, 220, or all 227) contiguous aas of the wt. IgG1 of FIG. 2D; where one or both (in the case of duplex T-Cell-MP) scaffold polypeptide sequence(s) may comprise additional substitutions such as L14 and/or L15 substitutions (e.g., “LALA” substitutions L234A and L235A), and/or N77 (N297 e.g., N297A or N297G).

[0307] In an embodiment, a T-Cell-MP or duplex T-Cell-MP comprises a scaffold polypeptide comprising an IgG1 sequence with a T130V, L131Y, F185A, and Y187V ZW1 substitutions, and its counterpart interspecific binding partner polypeptide comprises an IgG1 sequence having T130V, T146L, K172L, and T174W ZW1 substitutions, where the scaffold polypeptides comprise a sequence having at least 80%, at least 90%, at least 95%, or at least 97% sequence identity to at least 100 (e.g., at least 125, 150, 170, 180, 190, 200, 210, 220, or all 227) contiguous aas of the wt. IgG1 of FIG. 2D; where one or both (in the case of duplex T-Cell-MP) scaffold polypeptide sequence(s) may comprise additional substitutions such as L14 and/or L15 substitutions (e.g., “LALA” substitutions L234A and L235A), and/or N77 (N297 e.g., N297A or N297G).

[0308] In an embodiment, a T-Cell-MP or duplex T-Cell-MP comprises a scaffold polypeptide comprising an IgG1 sequence with a K140D, D179M, and Y187A 7.8.60 substitutions, and its counterpart interspecific binding partner polypeptide comprises an IgG1 sequence having T130V E125R, Q127R, T146V, and K189V 7.8.60 substitutions, where the scaffold polypeptides comprise a sequence having at least 80%, at least 90%, at least 95%, or at least 97% sequence identity to at least 100 (e.g., at least 125, 150, 170, 180, 190, 200, 210, 220, or all 227) contiguous aas of the wt. IgG1 of FIG. 2D; where one or both (in the case of duplex T-Cell-MP) scaffold polypeptide sequence(s) may comprise additional substitutions such as L14 and/or L15 substitutions (e.g., “LALA” substitutions L234A and L235A), and/or N77 (N297 e.g., N297A or N297G).

[0309] In an embodiment, a T-Cell-MP or duplex T-Cell-MP comprises a scaffold polypeptide comprising an IgG1 sequence with a K189D, and K172D DD-KK substitutions, and its counterpart interspecific binding partner polypeptide comprises an IgG1 sequence having T130V D179K and E136K DD-KK substitutions, where the scaffold polypeptides comprise a sequence having at least 80%, at least 90%, at least 95%, or at least 97% sequence identity to at least 100 (e.g., at least 125, 150, 170, 180, 190, 200, 210, 220, or all 227) contiguous aas of the wt. IgG1 of FIG. 2D; where one or both (in the case of duplex T-Cell-MP) scaffold polypeptide sequence(s) may comprise additional substitutions such as L14 and/or L15 substitutions (e.g., “LALA” substitutions L234A and L235A), and/or N77 (N297 e.g., N297A or N297G).

[0310] In an embodiment, a T-Cell-MP or duplex T-Cell-MP comprises a scaffold polypeptide comprising an IgG1 sequence with a K140E and K189W EW-RVT substitutions, its counterpart interspecific binding partner polypeptide comprises an IgG1 sequence having T130V Q127R, D179V, and F185T EW-RVT substitutions, where the scaffold polypeptides comprise a sequence having at least 80%, at least 90%, at least 95%, or at least 97% sequence identity to at least 100 (e.g., at least 125, 150, 170, 180, 190, 200, 210, 220, or all 227) contiguous aas of the wt. IgG1 of FIG. 2D; where one or both (in the case of duplex T-Cell-MP) scaffold polypeptide sequence(s) may comprise additional substitutions such as L14 and/or L15 substitutions (e.g., “LALA” substitutions L234A and L235A), and/or N77 (N297 e.g., N297A or N297G).

[0311] In an embodiment, a T-Cell-MP or duplex T-Cell-MP comprises a scaffold polypeptide comprising an IgG1 sequence with a K140E, K189W, and Y129C EW-RVTs-s substitutions, its counterpart interspecific binding partner polypeptide comprises an IgG1 sequence having T130V Q127R, D179V, F185T, and S134C EW-RVTs-s substitutions, where the scaffold polypeptides comprise a sequence having at least 80%, at least 90%, at least 95%, or at least 97% sequence identity to at least 100 (e.g., at least 125, 150, 170, 180, 190, 200, 210, 220, or all 227) contiguous aas of the wt. IgG1 of FIG. 2D; where one or both (in the case of duplex T-Cell-MP) scaffold polypeptide sequence(s) may comprise additional substitutions such as L14 and/or L15 substitutions (e.g., “LALA” substitutions L234A and L235A), and/or N77 (N297 e.g., N297A or N297G).

[0312] In an embodiment, a T-Cell-MP or duplex T-Cell-MP comprises a scaffold polypeptide comprising an IgG1 sequence with a K150E and K189W A107 substitutions, its counterpart interspecific binding partner polypeptide comprises an IgG1 sequence having T130V E137N, D179V, and F185T A107 substitutions, where the scaffold polypeptides comprise a sequence having at least 80%, at least 90%, at least 95%, or at least 97% sequence identity to at least 100 (e.g., at least 125, 150, 170, 180, 190, 200, 210, 220, or all 227) contiguous aas of the wt. IgG1 of FIG. 2D; where one or both (in the case of duplex T-Cell-MP) scaffold polypeptide sequence(s) may comprise additional substitutions such as L14 and/or L15 substitutions (e.g., “LALA” substitutions L234A and L235A), and/or N77 (N297 e.g., N297A or N297G).

[0313] As an alternative to the use of Ig CH2 and CH3 heavy chain constant regions as scaffold sequences, Ig light chain constant regions (see FIG. 2K) can be paired with Ig CH1 sequences (See, e.g., FIG. 2J) as interspecific scaffold sequences.

[0314] In an embodiment, a T-Cell-MP scaffold polypeptide comprises an Ig CH1 domain (e.g., the polypeptide of FIG. 2J), and the sequence with which it will form a complex (its counterpart binding partner) comprises is an Ig κ chain constant region sequence, where the scaffold polypeptide comprise a sequence having at least 80%, 85%, 90%, 95%, 98%, 99%, or 100% sequence identity to at least 70, at least 80, at least 90, at least 100, or at least 110 contiguous aas of SEQ ID NOs: 16 and/or 17. See FIG. 2K. The Ig CH1 and Ig κ sequences may be modified to increase their affinity for each other, and accordingly the stability of any heterodimer formed utilizing them. Among the substitutions that increase the stability of CH1-Ig κ heterodimers are those identified as the MD13 combination in Chen et al., MAbs, 8 (4): 761-774 (2016). In the MD13 combination two substitutions are introduced into to each of the IgCH1 and Ig κ sequences. The Ig CH1 sequence is modified to contain S64E and S66V substitutions (S70E and S72V of the sequence shown in FIG. 2J). The Ig κ sequence is modified to contain S69L and T71S substitutions (S68L and T70S of the sequence shown in FIG. 2K).

[0315] In another embodiment, a scaffold polypeptide of a T-Cell-MP comprises an Ig CH1 domain (e.g., the polypeptide of FIG. 2J, SEQ ID NO:15), and its counterpart sequence comprises an Ig λ chain constant region sequence such as is shown in FIG. 2K (SEQ ID NO:17), where the scaffold polypeptide comprises a sequence having at least 80%, 85%, 90%, 95%, 98%, 99%, or 100% sequence identity to at least 70 (e.g., at least 80, at least 90, or at least 100) contiguous aas of the sequences shown in FIG. 2K.

c. Effects on Stability and Half-Life

[0316] Suitable scaffold polypeptides (e.g., those with an Ig Fc scaffold sequence) will in some cases extend the half-life of T-Cell-MP polypeptides and their higher order complexes. In some cases, a suitable scaffold polypeptide increases the in vivo half-life (e.g., the serum half-life) of the T-Cell-MP or duplex T-Cell-MP, compared to a control T-Cell-MP or duplex T-Cell-MP lacking the scaffold polypeptide or comprising a control scaffold polypeptide. For example, in some cases, a scaffold polypeptide increases the in vivo half-life (e.g. serum half-life) of a conjugated or unconjugated T-Cell-MP or duplex T-Cell-MP, compared to an otherwise identical control lacking the scaffold polypeptide, or having a control scaffold polypeptide, by at least about 10%, at least about 20%, at least about 30%, at least about 50%, at least about 2-fold, at least about 5-fold, at least about 10-fold, at least about 25-fold, at least about 50-fold, at least about 100-fold, or more than 100-fold.

### 5 Immunomodulatory Polypeptides (“MODs”)

[0317] T-Cell-MPs may comprise, for example one or more aa sequences of MOD polypeptides. A Cell MP may comprises two or three aa sequences of MOD polypeptides that may be the same (identical sequences) or different (e.g., encoding different MOD polypeptide sequences). Different MOD polypeptide sequence include both different variants of a MOD (e.g., a wt. IL-2 and variant IL-2 polypeptide sequence) and MOD sequence that are unrelated (e.g., having different CoMOD receptors such as an IL-2 MOD and a CD86 MOD). Where the more than one MOD polypeptide is present they may be located in tandem or in series, optionally joined to each other by independently selected aa linker sequences without any other elements of the T-Cell-MP (e.g., β2M, MHC-H, or scaffold polypeptide) between the MOD polypeptide sequences. In some cases, a MOD present in a T-Cell-MP is a wt. MOD. In other cases, a MOD present in a T-Cell-MP is a variant MOD, e.g., a variant MOD that has reduced affinity for a Co-MOD, compared to the affinity of a corresponding wt. MOD for the Co-MOD. Suitable variant MODs for incorporation into a T-Cell-MP can be identified by, for example, mutagenesis, such as scanning mutagenesis (e.g., alanine, serine, or glycine scanning mutagenesis).

[0318] Exemplary pairs of MODs suitable for incorporation into a T-Cell-MP and their cognate Co-MODs include, but are not limited to, entries (a) to (t) listed in the following table:

### Exemplary Pairs of MODs and Co-MODs

| | |
|---|---|
| a) | 4-1BBL (MOD) and 4-1BB (Co-MOD); |
| b) | PD-L1 (MOD) and PD1 (Co-MOD); |
| c) | IL-2 (MOD) and IL-2 receptor (Co-MOD); |
| d) | CD80 (MOD) and CD28 (Co-MOD); |
| e) | CD86 (MOD) and CD28 (Co-MOD); |
| f) | OX40L (CD252) (MOD) and OX40 (CD134) (Co-MOD); |
| g) | Fas ligand (MOD) and Fas (Co-MOD); |
| h) | ICOS-L (MOD) and ICOS (Co-MOD); |
| i) | ICAM (MOD) and LFA-1 (Co-MOD); |
| j) | CD30L (MOD) and CD30 (Co-MOD); |
| k) | CD40 (MOD) and CD40L (Co-MOD); |
| l) | CD83 (MOD) and CD83L (Co-MOD); |
| m) | HVEM (CD270) (MOD) and CD 160 (Co-MOD); |
| n) | JAG1 (CD339) (MOD) and Notch (Co-MOD); |
| o) | JAG1 (CD339) (MOD) and CD46 (Co-MOD); |
| p) | CD70 (MOD) and CD27 (Co-MOD); |
| q) | CD80 (MOD) and CTLA4 (Co-MOD); |
| r) | CD86 (MOD) and CTLA4 (Co-MOD); |
| s) | PD-L1(MOD) and CD-80 (Co-MOD); and |
| t) | TGF-β1, TGF-β2, and/or TGF-β3 (MODs) and |
| | TGF-β Receptor (e.g., TGFBR1 and/or |
| | TGFBR2) (Co-MOD) |

[0319] Generally speaking, the MOD(s) present in a T-Cell-MP will be MODs that provide activating immunomodulatory signals to the T cell, including, e.g., signals that cause an increase in the number of epitope-specific T cells. Such MODs include, but are not limited to, wt. and variants of: IL-2; 4-1BBL; CD80; and CD86,

a. MODS and Variant MODs with Reduced Affinity

[0320] Suitable immunomodulatory domains that exhibit reduced affinity for a co-immunomodulatory domain can have from 1 aa to 20 aa differences from a wt. immunomodulatory domain. For example, in some cases, a variant MOD present in a T-Cell-MP differs in aa sequence by 1 aa to 10 aa, or by 11 aa to 20 aa from a corresponding wt. MOD. A variant MOD present in a T-Cell-MP may include a single aa substitution compared to a corresponding reference (e.g., wt.) MOD. A variant MOD present in a T-Cell-MP may include 2 aa substitutions compared to a corresponding reference (e.g., wt.) MOD. A variant MOD present in a T-Cell-MP may include 3 aa substitutions compared to a corresponding reference (e.g., wt.) MOD. A variant MOD present in a T-Cell-MP may include 4 aa substitutions compared to a corresponding reference (e.g., wt.) MOD. A variant MOD present in a T-Cell-MP may include 5 aa substitutions compared to a corresponding reference (e.g., wt.) MOD. A variant MOD present in a T-Cell-MP may include 6 aa or 7 aa substitutions compared to a corresponding reference (e.g., wt.) MOD. A variant MOD present in a T-Cell-MP may include 8 aa, 9 aa, or 10 aa substitutions compared to a corresponding reference (e.g., wt.) MOD. A variant MOD present in a T-Cell-MP may include 11, 12, 13, 14, or 15 aa substitutions compared to a corresponding reference (e.g., wt.) MOD. A variant MOD present in a T-Cell-MP may include 16, 17, 18, 19, or 20 aa substitutions compared to a corresponding reference (e.g., wt.) MOD.

[0321] As discussed above, a variant MOD suitable for inclusion in a T-Cell-MP may exhibit reduced affinity for a cognate Co-MOD, compared to the affinity of a corresponding wt. MOD for the cognate Co-MOD. Similarly, a T-Cell-MP that comprises a variant MOD exhibits reduced affinity for the MOD's cognate Co-MOD as compared to the binding affinity of the T-Cell-MP with a wild-type MOD for its cognate co-MOD.

[0322] Alternatively, or in addition to, reduced affinity binding, the MOD may be a variant that exhibits selective binding to a Co-MOD. In one aspect, where a MOD can bind to more than one Co-MOD, a variant may be chosen that selectively binds to at least one Co-MOD. For example, wt. PD-L1 binds to both PD-1 and CD80 (also known as B7-1). In such case, a variant PD-L1 MOD may be chosen that selectively (preferentially) binds either to PD-1 or CD80. Likewise, where a wt. MOD may bind to multiple polypeptides within a Co-MOD, a variant may be chosen to selectively bind to only the desired polypeptides with the Co-MOD. For example, IL-2 binds to the alpha, beta and gamma chains of IL-2R. A variant of IL-2 can be chosen that either binds with reduced affinity, or does not bind, to one of the polypeptides, e.g., the alpha chain of IL-2R, or even to two of the chains. For example, an IL-2 variant may have reduced binding to both the alpha chain and the beta chain.

### (i) Determining Binding Affinity

[0323] Binding affinity between a MOD and its cognate Co-MOD can be determined by bio-layer interferometry (BLI) using purified MOD and purified cognate Co-MOD. Binding affinity between a T-Cell-MP and its cognate Co-MOD can also be determined by BLI using purified T-Cell-MP and the cognate Co-MOD. BLI methods are well known to those skilled in the art. See, e.g., Lad et al. (2015) J. Biomol. Screen. 20 (4): 498-507; and Shah and Duncan (2014) J. Vis. Exp. 18: e51383. The specific and relative binding affinities described in this disclosure between a Co-MOD and a MOD, or between a Co-MOD and a T-Cell-MP (or its epitope conjugate), can be determined using the procedures described or assessment of TMP molecules in PCT/US2018/049756 published as WO 2019/051091. See e.g., paragraphs [0052] to [0064].

[0324] Unless otherwise stated herein, the affinity of a T-Cell-MP-epitope conjugate for a Co-MOD, or the affinity of a control T-Cell-MP-epitope conjugate (where a control T-Cell-MP-epitope conjugate comprises a wt. MOD) for a Co-MOD, is determined using BLI, as described above. Likewise, the affinity of a MOD and its Co-MOD polypeptide can be determined using BLI as described above.

[0325] A variant MOD present in a T-Cell-MP may bind to its Co-MOD with an affinity that is at least 10% less, at least 15% less, at least 20% less, at least 25% less, at least 30% less, at least 35% less, at least 40% less, at least 45% less, at least 50% less, at least 55% less, at least 60% less, at least 65% less, at least 70% less, at least 75% less, at least 80% less, at least 85% less, at least 90% less, at least 95% less, or more than 95% less, than the affinity of a corresponding wt. MOD for the Co-MOD.

[0326] The combination of the reduced affinity of the MOD for its Co-MOD and the affinity of the epitope for a TCR provides for enhanced selectivity of a T-Cell-MP-epitope conjugate, while still allowing for activity of the MOD. Thus, a T-Cell-MP-epitope conjugate may bind selectively to a first T cell that displays both: i) a TCR specific for the epitope present in the T-Cell-MP-epitope conjugate; and ii) a Co-MOD that binds to the MOD present in the T-Cell-MP-epitope conjugate, compared to binding to a second T cell that displays: i) a TCR specific for an epitope other than the epitope present in the T-Cell-MP-epitope conjugate; and ii) a Co-MOD that binds to the MOD present in the T-Cell-MP-epitope conjugate.

b. Wild-Type and Variant CD80 MODs

[0327] In some cases, a variant MOD polypeptide present in a T-Cell-MP is a variant CD80 polypeptide. Wild-type CD80 binds to CD28.

[0328] A wild-type amino acid sequence of the ectodomain of human CD80 can be as follows: VIHVTK EVKEVATLSC GHNVSVEELA QTRIYWQKEK KMVLTMMSGD MNIWPEYKNR TIFDITNNLS IVILALRPSD EGTYECVVLK YEKDAFKREH LAEVTLSVKA DFPTPSISDF EIPTSNIRRI ICSTSGGFPE PHLSWLENGE ELNAINTTVS QDPETELYAV SSKLDFNMTT NHSFMCLIKY GHLRVNQTFN WNTTKQEHFP DN (SEQ ID NO:106).

[0329] A wild-type CD28 amino acid sequence can be as follows: MLRLLLALNL FPSIQVTGNK ILVKQSPMLV AYDNAVNLSC KYSYNLFSRE FRASLHKGLD SAVEVCVVYG NYSQQLQVYS KTGFNCDGKL GNESVTFYLQ NLYVNQTDIY FCKIEVMYPP PYLDNEKSNG TIIHVKGKHL CPSPLFPGPS KPFWVLVVVG GVLACYSLLV TVAFIIFWVR SKRSRLLHSD YMNMTPRRPG PTRKHYQPYA PPRDFAAYRS (SEQ ID NO:107). In some cases, where a T-Cell-MP comprises a variant CD80 polypeptide, a Co-MOD is a CD28 polypeptide comprising the amino acid sequence of SEQ ID NO: 107.

[0330] A wild-type CD28 amino acid sequence can also be as follows: MLRLLLALNL FPSIQVTGNK ILVKQSPMLV AYDNAVNLSW KHLCPSPLFP GPSKPFWVLV VVGGVLACYS LLVTVAFIIF WVRSKRSRLL HSDYMNMTPR RPGPTRKHYQ PYAPPRDFAA YRS (SEQ ID NO:108).

[0331] A wild-type CD28 amino acid sequence can be as follows: MLRLLLALNL FPSIQVTGKH LCPSPLFPGP SKPFWVLVVV GGVLACYSLL VTVAFIIFWV RSKRSRLLHS DYMNMTPRRP GPTRKHYQPY APPRDFAAYR S (SEQ ID NO:109).

[0332] In some cases, a variant CD80 polypeptide exhibits reduced binding affinity to CD28, compared to the binding affinity of a CD80 polypeptide comprising the amino acid sequence set forth in SEQ ID NO:107 for CD28. For example, in some cases, a variant CD80 polypeptide binds CD28 with a binding affinity that is at least 10% less (e.g., at least: 15% less, 20% less, 25% less, 30% less, 35% less, 40% less, 45% less, 50% less, 55% less, 60% less, 65% less, 70% less, 75% less, 80% less, 85% less, 90% less, 95% less, or more than 95% less) than the binding affinity of a CD80 polypeptide comprising the amino acid sequence set forth in SEQ ID NO: 107 for CD28 (e.g., a CD28 polypeptide comprising the amino acid sequence set forth in one of SEQ ID NOs: 107, 108, or 109) when assayed under the same conditions.

[0333] In some cases, a variant CD80 polypeptide has a single amino acid insertion, deletion, or substitution compared to the CD80 amino acid sequence set forth in SEQ ID NO:106. In some cases, a variant CD80 polypeptide has from 2 to 10 aa insertions, deletions, or substitutions compared to the CD80 amino acid sequence set forth in SEQ ID NO:106. In some cases, a variant CD80 polypeptide has 2, 3, 4, 5, 6, 7, 8, 9, or 10 amino acid insertions, deletions, and/or substitutions compared to the CD80 amino acid sequence set forth in SEQ ID NO: 106.

[0334] Suitable CD80 variants are described in published PCT Application WO 2019/051091, published 14 Mar. 2019 (Applicant Cue Biopharma, Inc.). See paragraphs [00170]-[00196], the disclosure of which is expressly incorporated herein by reference.

c. Wild-Type and Variant CD86 MODs

[0335] In some cases, a variant MOD polypeptide present in a T-Cell-MP is a variant CD86 polypeptide. Wild-type CD86 binds to CD28.

[0336] The amino acid sequence of the full ectodomain of a wild-type human CD86 can be as follows:

(SEQ ID NO: 110)
APLKIQAYFNETADLPCQFANSQNQSLSELVVFWQDQENLVLNEVYLGKE
KFDSVHSKYMNRTSFDSDSWTLRLHNLQIKDKGLYQCIIHHKKPTGMIRI
HQMNSELSVLANFSQPEIVPISNITENVYINLTCSSIHGYPEPKKMSVLL
RTKNSTIEYDGIMQKSQDNVTELYDVSISLSVSFPDVTSNMTIFCILETD
KTRLLSSPFSIELEDPQPPPDHIP.

[0337] The amino acid sequence of the IgV domain of a wild-type human CD86 can be as follows:

(SEQ ID NO: 111)
APLKIQAYFNETADLPCQFANSQNQSLSELVVFWQDQENLVLNEVYLGKE
KFDSVHSKYMNRTSFDSDSWTLRLHNLQIKDKGLYQCIIHHKKPTGMIRI
HQMNSELSVL.

[0338] In some cases, a variant CD86 polypeptide exhibits reduced binding affinity to CD28, compared to the binding affinity of a CD86 polypeptide comprising the amino acid sequence set forth in SEQ ID NO:110 or SEQ ID NO:111 for CD28. For example, in some cases, a variant CD86 polypeptide binds CD28 with a binding affinity that is at least 10% less, at least 15% less, at least 20% less, at least 25% less, at least 30% less, at least 35% less, at least 40% less, at least 45% less, at least 50% less, at least 55% less, at least 60% less, at least 65% less, at least 70% less, at least 75% less, at least 80% less, at least 85% less, at least 90% less, at least 95% less, or more than 95% less than the binding affinity of a CD86 polypeptide comprising the amino acid sequence set forth in SEQ ID NO:110 or SEQ ID NO: 111 for CD28 (e.g., a CD28 polypeptide comprising the amino acid sequence set forth in one of SEQ ID NOs: 107, 108, or 109) when assayed under the same conditions.

[0339] In some cases, a variant CD86 polypeptide has a single aa insertion, deletion, or substitutions compared to the CD86 amino acid sequence set forth in SEQ ID NO: 110. In some cases, a variant CD86 polypeptide has from 2 to 10 amino acid insertions, deletions, and/or substitutions compared to the CD86 amino acid sequence set forth in SEQ ID NO:110. In some cases, a variant CD86 polypeptide has 2, 3, 4, 5, 6, 7, 8, 9, or 10 aa insertions, deletions, and/or substitutions compared to the CD86 amino acid sequence set forth in SEQ ID NO: 110.

[0340] Suitable CD86 variants are described in published PCT Application WO 2019/051091, published 14 Mar. 2019 (Applicant Cue Biopharma, Inc.). See paragraphs [00197]-[00228], the disclosure of which is expressly incorporated herein by reference.

d. Wild-Type and Variant 4-1BBL MODs

[0341] In some cases, a variant MOD polypeptide present in a T-Cell-MP is a variant 4-1BBL polypeptide. Wild-type 4-1BBL binds to 4-1BB (CD137).

[0342] A wild-type 4-1BBL amino acid sequence can be as follows: MEYASDASLD PEAPWPPAPR ARACRVLPWA LVAGLLLLLL LAAACAVFLA CPWAVSGARA SPGSAASPRL REGPELSPDD PAGLLDLRQG MFAQLVAQNV LLIDGPLSWY SDPGLAGVSL TGGLSYKEDT KELVVAKAGV YYVFFQLELR RWVAGEGSGS VSLALHLQPL RSAAGAAALA LTVDLPPASS EARNSAFGFQ GRLLHLSAGQ RLGVHLHTEA RARHAWQLTQ GATVLGLFRV TPEIPAGLPS PRSE (SEQ ID NO:112) NCBI Reference Sequence: NP_003802.1, where aas 29-49 are a transmembrane region.

[0343] In some cases, a variant 4-1BBL polypeptide is a variant of the tumor necrosis factor (TNF) homology domain (THD) of human 4-1BBL.

[0344] A wild-type amino acid sequence of the THD of human 4-1BBL can be, e.g., one of SEQ ID NOs: 113-115, as follows: [sequence omitted] (SEQ ID NO:113); D [sequence omitted] (SEQ ID NO:114); or D PAGLLDLRQG MFAQLVAQNV LLIDGPLSWY SDPGLAGVSL TGGLSYKEDT KELVVAKAGV YYVFFQLELR RVVAGEGSGS VSLALHLQPL RSAAGAAALA LTVDLPPASS EARNSAFGFQ GRLLHLSAGQ RLGVHLHTEA RARHAWQLTQ GATVLGLFRV TPEIPA (SEQ ID NO:115).

[0345] A wild-type 4-1BB amino acid sequence can be as follows: MGNSCYNIVA TLLLVLNFER TRSLQDPCSN CPAGTFCDNN RNQICSPCPP NSFSSAGGQR TCDICRQCKG VFRTRKECSS TSNAECDCTP GFHCLGAGCS MCEQDCKQGQ ELTKKGCKDC CFGTENDQKR GICRPWTNCS LDGKSVLVNG TKERDVVCGP SPADLSPGAS SVTPPAPARE PGHSPQIISF FLALTSTALL FLLFFLTLRF SVVKRGRKKL LYIFKQPFMR PVQTTQEEDG CSCRFPEEEE GGCEL (SEQ ID NO:116). In some cases, where a T-Cell-MP comprises a variant 4-1BBL polypeptide, a Co-MOD is a 4-1BB polypeptide comprising the amino acid sequence of SEQ ID NO:116.

[0346] Variant 4-1BBL polypeptides exhibit reduced binding affinity to 4-1BB, compared to the binding affinity of a 4-1BBL polypeptide comprising the amino acid sequence set forth in one of SEQ ID NOs: 112-115. For example, in some cases, a variant 4-1BBL polypeptide binds 4-1BB with a binding affinity that is at least 10% less, at least 15% less, at least 20% less, at least 25% less, at least 30% less, at least 35% less, at least 40% less, at least 45% less, at least 50% less, at least 55% less, at least 60% less, at least 65% less, at least 70% less, at least 75% less, at least 80% less, at least 85% less, at least 90% less, at least 95% less, or more than 95% less than the binding affinity of a 4-1BBL polypeptide comprising the amino acid sequence set forth in one of SEQ ID NOs: 112-115 for a 4-1BB polypeptide (e.g., a 4-1BB polypeptide comprising the amino acid sequence set forth in SEQ ID NO:116), when assayed under the same conditions.

[0347] 4-1BBL variants suitable for use as a MOD in a T-Cell-MP include those comprising a sequence with at least one aa substitution and having at least 90%, at least 95%, at least 98%, or at least 99% aa sequence identity to SEQ ID NOs: 113, 114 or 115. 4-1BBL variants suitable for use as a MOD in a T-Cell-MP include those comprising a sequence with at least two aa substitutions and having at least 90%, at least 95%, at least 98%, or at least 99% aa sequence identity to SEQ ID NOs: 113, 114 or 115.

[0348] 4-1BBL variants suitable for inclusion in a T-Cell-MP include those comprising a sequence with at least one aa substitution (e.g., two, three, or four insertions, deletions, and/or substitutions) include those having at least 90%, at least 95%, at least 98%, or at least 99% aa sequence identity to at least 140 (e.g., at least 160, 175, 180, or 181) contiguous aas of SEQ ID NO:113.

[0349] Suitable 4-1BBL variants are described in published PCT Application WO 2019/051091, published 14 Mar. 2019 (Applicant Cue Biopharma, Inc.). See paragraphs [00229]-[00324], the disclosure of which is expressly incorporated herein by reference.

e. Wild-Type and Variant IL-2 MODs

[0350] In some cases, a variant MOD polypeptide present in a T-Cell-MP is a variant IL-2 polypeptide. Wild-type IL-2 binds to IL-2 receptor (IL-2R), i.e., a heterotrimeric polypeptide comprising IL-2Rα, IL-2Rβ, and IL-2Rγ.

[0351] A wild-type IL-2 amino acid sequence can be as follows: APTSSSTKKT QLQLEHLLLD LQMILNGINN YKNPKLTRML TFKFYMPKKA TELKHLQCLEEELKPLEEVL NLAQSKNFHL RPRDLISNIN VIVLELKGSE TTFMCEYADE TATIVEFLNRWITFCQSIIS TLT (UniProt, P60568, SEQ ID NO: 117).

[0352] Wild-type IL2 binds to an IL2 receptor (IL2R) on the surface of a cell. An IL2 receptor is in some cases a heterotrimeric polypeptide comprising an alpha chain (IL-2Rα; also referred to as CD25), a beta chain (IL-2Rβ; also referred to as CD122) and a gamma chain (IL-2Rγ; also referred to as CD132). Amino acid sequences of human IL-2Rα, IL2Rβ, and IL-2Rγ are provided in the accompanying sequence listing as SEQ ID NO:118, SEQ ID NO:119, and SEQ ID NO: 120, and are also provided in, for example, U.S. Patent Pub. No. 20200407416.

[0353] Suitable variant IL-2 polypeptide sequences include polypeptide sequences comprising an aa sequence having at least 80% (e.g., at least 85%, at least 90%, at least 95%, at least 98%, at least 99%, or 100%) aa sequence identity to at least 80 (e.g., 90, 100, 110, 120, 130 or 133) contiguous aas of SEQ ID NO: 117. Potential amino acids where substitutions may be introduced include one or more of the following positions:
[0354] (i) position 15, where the aa is other than E (e.g., A);
[0355] (ii) position 16, where the aa is other than H (e.g., A, T, E, D, N, C, Q, M, V or W);
[0356] (iii) position 20 is an aa other than D (e.g., A);
[0357] (iv) position 42, where the aa is other than F (e.g., A, M, P, S, T, Y, V or H);
[0358] (v) position 45, where the aa is other than Y (e.g., A);
[0359] (vi) position 88, where the aa is other than N (e.g., A or R);
[0360] (vii) position 126, where the aa is other than Q (e.g., A); SEQ ID NO:2086.

[0361] Combinations of the above substitutions include (H16X, F42X), (D20X, F42X), (E15X, D20X, F42X), (an H16X, D20X, F42X), (H16X, F42X, R88X), (H16X, F42X, Q126X), (D20X, F42X, Q126X), (D20X, F42X, and Y4X), (H16X, D20X, F42X, and Y45X), (D20X, F42X, Y45X, Q126X), (H16X, D20X, F42X, Y45X, Q126X), where X is the substituted aa, optionally chosen from the following: positions 15, 20, 45, 126—A; position 16—A or T, or also N, C, Q, M, V or W; position 42—A, or also M, P, S, T, Y, V or H; position 88—A or R.

[0362] Suitable variant IL-2 polypeptide sequences include polypeptide sequences comprising at least one insertion, deletion, or substitution and comprise an aa sequence having at least 90% (e.g., at least 95%, at least 98%, at least 99%, or 100%) aa sequence identity to at least 90 (e.g., 95, 100, 110, 120, 130 or 133) contiguous aas of SEQ ID NO: 117.

[0363] IL-2 variants include polypeptides having at least 90% (e.g., at least 95%, 98%, or 99%) aa sequence identity to at least 80 (e.g., at least 90, 100, 110, 120, or 130) contiguous aas of SEQ ID NO: 117, wherein the aa at position 16 is an aa other than H. In one case, the position of H16 is substituted by Asn, Cys, Gln, Met, Val, or Trp. In one case, the position of H16 is substituted by Ala. In another case, the position of H16 is substituted by Thr. Additionally, or alternatively, IL-2 variants include polypeptides having at least 90% (e.g., at least 95%, 98%, or 99%) aa sequence identity to at least 80 (e.g., at least 90, 100, 110, 120, or 130) contiguous aas of SEQ ID NO:117, wherein the aa at position 42 is an aa other than F. In one case, the position of F42 is substituted by Met, Pro, Ser, Thr, Trp, Tyr, Val, or His. In one case, the position of F42 is substituted by Ala.

[0364] In some cases, an IL-2 variant MOD of this disclosure exhibits decreased binding to IL-2Rα, thereby minimizing or substantially reducing the activation of Tregs by the IL-2 variant. Alternatively, or additionally, in some cases, an IL-2 variant MOD of this disclosure exhibits decreased binding to IL-2Rβ and/or IL-2Rγ such that the IL-2 variant MOD exhibits an overall reduced affinity for IL-2R. In some cases, an IL-2 variant MOD of this disclosure exhibits both properties, i.e., it exhibits decreased or substantially no binding to IL-2Rα, and also exhibits decreased binding to IL-2Rβ and/or IL-2Rγ such that the IL-2 variant polypeptide exhibits an overall reduced affinity for IL-2R. For example, IL-2 variants having substitutions at H16 and F42 have shown decreased binding to IL-2Rα and IL-2Rβ. See, Quayle et al., Clin Cancer Res; 26 (8) Apr. 15, 2020, which discloses that the binding affinity of an IL-2 polypeptide with H16A and F42A substitutions for human IL-2Rα and IL-2Rβ was decreased 110- and 3-fold, respectively, compared with wild-type IL2 binding, predominantly due to a faster off-rate for each of these interactions. TMPs comprising such variants, including variants that exhibit decreased binding to IL-2Rα and IL-2Rβ, have shown the ability to preferentially bind to and activate IL-2 receptors on T cells that contain the target TCR that is specific for the peptide epitope on the TMP, and are thus less likely to deliver IL-2 to non-target T cells, i.e., T cells that do not contain a TCR that specifically binds the peptide epitope on the TMP. That is, the binding of the IL-2 variant MOD to its costimulatory polypeptide on the T cell is substantially driven by the binding of the MHC-epitope moiety rather than by the binding of the IL-2. IL-2 variants thus include polypeptides comprising an aa sequence comprising all or part of human IL-2 having a substation at position H16 and/or F42 (e.g., H16A and/or F42A substitutions).

[0365] IL-2 variants include polypeptides having at least 90% (e.g., at least 95%, 98%, or 99%) aa sequence identity to at least 80 (e.g., at least 100, 110, 120, or 130) contiguous aas of SEQ ID NO: 117, wherein the aa at position 16 is an aa other than H and the aa at position 42 is other than F (SEQ ID NO:2087). In one case, the position of H16 is substituted by Ala or Thr and the position of F42 is substituted by Ala or Thr. In one case, the position of H16 is substituted by Ala and the position of F42 is substituted by Ala (an H16A and F42A variant SEQ ID NO: 2088). In a second case, the position of H16 is substituted by Thr and the position of F42 is substituted by Ala (an H16T and F42A variant). In a third case, the position of H16 is substituted by Ala and the position of F42 is substituted by Thr (an H16A and F42T variant). In a fourth case, the position of H16 is substituted by Thr and the position of F42 is substituted by Ala (an H16D and F42A variant). In each of the foregoing pairs of substitutions, the F42A substitution could be replaced by an F42T substitution. As noted above, such variants will exhibit reduced binding to both the human IL-2Rα chain and IL2Rβ chain.

[0366] In any of the wild-type or variant IL-2 sequences provided herein, the cysteine at position 125 may be substituted with an alanine (a C125A substitution). In addition to any stability provided by the substitution, it may be employed where, for example, an epitope containing peptide or payload is to be conjugated to a cysteine residue elsewhere in a T-Cell-MP first or second polypeptide, thereby avoiding competition from the C125 of the IL-2 MOD sequence.

f. Wild-Type and Variant PD-L1 MODs

[0367] As noted above, the MOD(s) that will be present in a T-Cell-MP generally will be MODs that provide activating immunomodulatory signals to the T cell, including, e.g., signals that cause an increase in the number of epitope-specific T cells. In some cases, however, it may be desirable to include a MOD that can provide an inhibitory/suppressing immunomodulatory signal to T cells, or may have an activating effect to T cell under some conditions, e.g., a PD-L1.

[0368] Suitable wild-type PD-L1 and PD-L1 variants are described in published PCT Application WO 2019/051091, published 14 Mar. 2019 (Applicant Cue Biopharma, Inc.). See paragraphs [00157]-[00169], the disclosure of which is expressly incorporated herein by reference. Other inhibitory/suppressing immunomodulatory, e.g., FasL also are known and may be included where an inhibitory/suppressing immunomodulatory signal is desired.

### 6 Linkers

[0369] T-Cell-MPs (and their T-Cell-MP-epitope conjugates) can include one or more independently selected linker polypeptide sequences interposed between, for example, any one or more elements of a T-Cell-MP, for example:
[0370] i) two MOD polypeptides located on the N-terminal side of the β2M polypeptide sequence (referred to as an L 1linker or position);
[0371] (ii) between a MOD and a β2M polypeptide sequence (referred to as an L2 linker or position);
[0372] (iii) between a β2M polypeptide sequence and a MHC-H polypeptide sequence (referred to as an L3 linker or position);
[0373] (iv) between a MHC-H polypeptide sequence and a scaffold polypeptide sequence (referred to as an L4 linker or position);
[0374] (iv) at the carboxyl end of the scaffold or between a scaffold polypeptide sequence and a MOD polypeptide sequence placed carboxy terminal to it (referred to as an L5 linker or position); or
[0375] (vi) between two MOD polypeptide sequences placed on the carboxy side of the scaffold (referred to as an L6 linker or position).
[0376] See, e.g., FIG. 5.

[0377] Chemical conjugation sites for coupling epitopes (e.g., peptide epitopes) may be incorporated into linkers (e.g., L1-L6 linkers) including the L3 between the MHC-H and β2M polypeptide sequences. Accordingly, chemical conjugation sites including, but not limited to: sulfatase, sortase, transglutaminase, selenocysteine, non-natural amino acids, and naturally occurring proteinogenic amino acids (e.g., cysteine residues) etc. may be incorporated into linkers, including the L3 linker. Polypeptide linkers placed at either the N- or C-termini provide locations to couple additional polypeptides (e.g., histidine tags), payloads and the like, and to protect the polypeptide from exoproteases.

[0378] Linkers may also be utilized between the peptide epitope and any reactive chemical moiety (group) used to couple the peptide epitope to the chemical conjugation site of an unconjugated T-Cell-MP (see e.g., FIG. 10). Linkers utilized between epitope (e.g., peptide epitope) and a reactive chemical moiety may be peptide/polypeptide linkers, and/or other chemical linkers (e.g., non-peptide linkers in the form of homo or hetero bifunctional linkers that comprise an alkyl group as a spacer, see e.g., FIG. 10 at entries d and e).

[0379] Suitable polypeptide linkers (also referred to as “spacers”) can be readily selected and can be of any of a number of suitable lengths, such as from 1 aa to 50 aa, from 1aa to 5 aa, from 1 aa to 15 aa, from 2 aa to 15 aa, from 2 aa to 25 aa, from 3 aa to 12 aa, from 4 aa to 10 aa, from 4 aa to 35 aa, from 5 aa to 35 aa, from 5 aa to 10 aa, from 5 aa to 20 aa, from 6 aa to 25 aa, from 7 aa to 35 aa, from 8aa to 40 aa, from 9 aa to 45 aa, from 10 to 15 aa, from 10 aa to 50 aa, from 15 to 20 aa, from 20 to 40 aa, or from 40 to 50 aa. Suitable polypeptide linkers in the range from 10 to 50 aas in length may be from 10 to 20, from 10 to 25, from 15 to 25, from 20 to 30, from 25 to 35, from 25 to 50 30 to 35, from 35 to 45, or from 40 to 50). In embodiments, a suitable linker can be 1, 2, 3, 4, 5, 6, 7, 8, 9, 10, 11, 12, 13, 14, 15, 16, 17, 18, 19, 20, 21, 22, 23, 24, 25, 26, 27, 28, 29, 30, 31, 32, 33, 34, 35, 36, 37, 38, 39, 40, 41, 42, 43, 44, 45, 46, 47, 48, 49, or 50 aa in length. A polypeptide linker may have a length of from 15 aa to 50 aa, e.g., from 20 to 35, from 25 to 30, from 25 to 45, from 30 to 35, from 35 to 40, from 40 to 45, or from 45 to 50 aa in length. Linkers can be generally classified into three groups, i.e., flexible, rigid and cleavable. See, e.g., Chen et al. (2013) Adv. Drug Deliv. Rev. 65:1357; and Klein et al. (2014) Protein Engineering, Design & Selection 27:325. Unless stated otherwise, the linkers employed in the T-Cell-MPs of this disclosure are not the cleavable linkers generally known in the art.

[0380] Polypeptide linkers in the T-Cell-MP may include, for example, polypeptides that comprise, consist essentially of, or consists of: i) Gly and/or Ser; ii) Ala and Ser; iii) Gly, Ala, and Ser; iv) Gly, Ser, and Cys (e.g., a single Cys residue); v) Ala, Ser, and Cys (e.g., a single Cys residue); and vi) Gly, Ala, Ser, and Cys (e.g., a single Cys residue). Exemplary linkers may comprise glycine polymers, glycine-serine polymers, glycine-alanine polymers; alanine-serine polymers (including, for example polymers comprising the sequences GA, AG, AS, SA, GS, GSGGS (SEQ ID NO: 121) or GGGS (SEQ ID NO:122), any of which may be repeated from 1 to 10 times (e.g., repeated 1, 2, 3, 4, 5, 6, 7, 8, 9, or 10 times); and other flexible linkers known in the art. Glycine and glycine-serine polymers can both be used as both Gly and Ser are relatively unstructured and therefore can serve as a neutral tether between components. Glycine polymers access significantly more phi-psi space than even alanine polymers, and are much less restricted than residues with longer side chains (see Scheraga, Rev. Computational Chem. 11173-142 (1992). Exemplary linkers may also comprise an aa sequence comprising, but not limited to, GGSG (SEQ ID NO:123), GGSGG (SEQ ID NO:124), GSGSG (SEQ ID NO:125), GSGGG (SEQ ID NO:126), GGGSG (SEQ ID NO:127), GSSSG (SEQ ID NO:128), any of which may be repeated from 1 to 15 times (e.g., repeated 1, 2, 3, 4, 5, 6, 7, 8, 9, 10, 11, 12, 13, 14, or 15 times), or combinations thereof, and the like. Linkers can also comprise the sequence Gly(Ser)₄ (SEQ ID NO:129) or (Gly)₄Ser (SEQ ID NO: 130), either of which may be repeated from 1 to 10 times (e.g., 1, 2, 3, 4, 5, 6, 7, 8, 9, or 10 times). In an embodiment, the linker comprises the X1-X2-X3-X4-X5 where X1-X5 are selected from glycine and serine, and one of which may be a leucine, cysteine, methionine, or alanine (SEQ ID NO: 131). In one embodiment the linker comprises the aa sequence AAAGG (SEQ ID NO: 132), which may be repeated from 1 to 10 times.

[0381] Rigid polypeptide linkers comprise a sequence of amino acids that effectively separates protein domains by maintaining a substantially fixed distance/spatial separation between the domains, thereby reducing or substantially eliminating unfavorable interactions between such domains. Rigid polypeptide linkers thus may be employed where it is desired to minimize the interaction between the domains of the T-Cell-MP at any of linker positions L1-L6. For example, when the T-Cell-MP comprises one or more C-terminal MODs, then a rigid linker may be employed at position L5 or L6 to provide spacing between the T-Cell-MP scaffold and the MOD(s). Rigid peptide linkers include peptide linkers rich in proline, and peptide linkers having an inflexible helical structure, such as an α-helical structure. Examples of rigid peptide linkers include, e.g., (EAAAK)n (SEQ ID NO:133), A (EAAAK)nA (SEQ ID NO: 134), A (EAAAK)nALEA (EAAAK)nA (SEQ ID NO:135), (Lys-Pro)n, (Glu-Pro)n, (Thr-Pro-Arg)n, and (Ala-Pro)n where n is an integer from 1 to 20 (e.g., n is 1, 2, 3, 4, 5, 6, 7, 8, 9, 10, 11, 12, 13, 14, 15, 16, 17, 18, 19, or 20). Non-limiting examples of suitable rigid linkers comprising EAAAK (SEQ ID NO:136) include EAAAK (SEQ ID NO:136), (EAAAK)2 (SEQ ID NO:137), (EAAAK)3 (SEQ ID NO:138), A(EAAAK)4ALEA (EAAAK)4A (SEQ ID NO:139), and AEAAAKEAAAKA (SEQ ID NO: 140). Non-limiting examples of suitable rigid linkers comprising (AP)n include APAP (SEQ ID NO:141; also referred to herein as “(AP)2”); APAPAPAP (SEQ ID NO:142; also referred to herein as “(AP)4”); APAPAPAPAPAP (SEQ ID NO:143; also referred to herein as “(AP)6”); APAPAPAPAPAPAPAP (SEQ ID NO: 144; also referred to herein as “(AP)8”); and APAPAPAPAPAPAPAPAPAP (SEQ ID NO: 145; also referred to herein as “(AP)10”). Non-limiting examples of suitable rigid linkers comprising (KP) n include KPKP (SEQ ID NO:146; also referred to herein as “(KP) 2”); KPKPKPKP (SEQ ID NO:147; also referred to herein as “(KP) 4”); KPKPKPKPKPKP (SEQ ID NO:148; also referred to herein as “(KP) 6”); KPKPKPKPKPKPKPKP (SEQ ID NO:149; also referred to herein as “(KP) 8”); and KPKPKPKPKPKPKPKPKPKP (SEQ ID NO:150; also referred to herein as “(KP) 10”). Non-limiting examples of suitable rigid linkers comprising (EP) n include EPEP (SEQ ID NO:151; also referred to herein as “(EP) 2”); EPEPEPEP (SEQ ID NO:152; also referred to herein as “(EP) 4”); EPEPEPEPEPEP (SEQ ID NO: 153; also referred to herein as “(EP) 6”); EPEPEPEPEPEPEPEP (SEQ ID NO:154; also referred to herein as “(EP) 8”); and EPEPEPEPEPEPEPEPEPEP (SEQ ID NO:155; also referred to herein as “(EP) 10”).

[0382] In some cases, a linker polypeptide present in a T-Cell-MP includes a cysteine residue that can form a disulfide bond with a cysteine residue present elsewhere in the T-Cell-MP, in another T-Cell-MP, or act as a chemical conjugation site for the coupling of an epitope (e.g., via reaction with a maleimide). In some cases, for example, the linker comprises Gly, Ser and a single Cys, such as in the aa sequence GCGGS (G4S) (SEQ ID NO:156) where the G₄S unit may be repeated from 1 to 10 times (e.g., repeated 1, 2, 3, 4, 5, 6, 7, 8, 9, or 10 times), GCGASGGGGSGGGGS (SEQ ID NO:157), GCGGSGGGGSGGGGSGGGGS (SEQ ID NO:158) or GCGGSGGGGSGGGGS (SEQ ID NO:159).

[0383] A linker may comprise the aa sequence (GGGGS) (SEQ ID NO: 130, that may also be represented as Gly₄Ser or G₄S), which may be repeated from 1 to 10 times (e.g., 1, 2, 3, 4, 5, 6, 7, 8, 9, or 10 times). In some embodiments a linker comprising G₄S repeats has one glycine or serine residue replaced by a leucine or methionine. A first T-Cell-MP comprising a Gly₄Ser containing linker polypeptide that includes a cysteine residue may, when duplexed with a second T-Cell-MP, form a disulfide bond with a cysteine residue present in the second T-Cell-MP of the duplex T-Cell-MP. Such cysteine residues present in linkers (particularly the L3 linker) may also be utilized as a chemical conjugation site for the attachment of an epitope (e.g., a peptide epitope), such as by reaction with a maleimide functionality that is part of, or indirectly connected by a linker to, the epitope. In some cases, for example, the linker comprises the aa sequence GCGGS (G₄S) (SEQ ID NO: 156) where the G₄S unit may be repeated from 1 to 10 times (e.g., repeated 1, 2, 3, 4, 5, 6, 7, 8, 9, or 10 times), GCGASGGGGSGGGGS (SEQ ID NO:157), the sequence GCGGSGGGGSGGGGSGGGGS (SEQ ID NO: 158) or the sequence GCGGSGGGGSGGGGS (SEQ ID NO: 159). Non-peptide linkers that may be used to covalently attach epitopes, targeting sequences (e.g., polypeptides comprising a targeting sequence), and/or payloads (e.g., a drug or labeling agent) to a T-Cell-MP (including its peptide linkers) may take a variety of forms, including, but not limited to, alkyl, poly(ethylene glycol), disulfide groups, thioether groups, acid labile groups, photolabile groups, peptidase labile groups, and esterase labile groups. The non-peptide linkers (or “crosslinkers”) may also be, for example, homobifunctional or heterobifunctional linkers that comprise reactive end groups such as N-hydroxysuccinimide esters, maleimide, iodoacetate esters, and the like. Examples of suitable cross-linkers include: N-succinimidyl-[(N-maleimidopropionamido)-tetraethyleneglycol]ester (NHS-PEG4-maleimide); N-succinimidyl 4-(2-pyridyldithio) butanoate (SPDB); N-succinimidyl 4-(2-pyridyldithio) 2-sulfobutanoate (sulfo-SPDB); N-succinimidyl 4-(2-pyridyldithio) pentanoate (SPP); N-succinimidyl-4-(N-maleimidomethyl)-cyclohexane-1-carboxy-(6-amidocaproate) (LC-SMCC); κ-maleimidoundecanoic acid N-succinimidyl ester (KMUA); γ-maleimide butyric acid N-succinimidyl ester (GMBS); ε-maleimidocaproic acid N-hydroxysuccinimide ester (EMCS); m-maleimide benzoyl-N-hydroxysuccinimide ester (MBS); N-(α-maleimidoacetoxy)-succinimide ester (AMAS); succinimidyl-6-(β-maleimidopropionamide) hexanoate (SMPH); N-succinimidyl 4-(p-maleimidophenyl) butyrate (SMPB); N-(p-maleimidophenyl) isocyanate (PMPI); N-succinimidyl 4 (2-pyridylthio) pentanoate (SPP); N-succinimidyl(4-iodo-acetyl)aminobenzoate (SIAB); 6-maleimidocaproyl (MC); maleimidopropanoyl (MP); p-aminobenzyloxycarbonyl (PAB); N-succinimidyl 4-(maleimidomethyl)cyclohexane-carboxylate (SMCC); N-succinimidyl-4-(N-maleimidomethyl)-cyclohexane-1-carboxy-(6-amidocaproate), a “long chain” analog of SMCC (LC-SMCC); 3-maleimidopropanoic acid N-succinimidyl ester (BMPS); N-succinimidyl iodoacetate (SIA); N-succinimidyl bromoacetate (SBA); and N-succinimidyl 3-(bromoacetamido) propionate (SBAP).

### 7 Additional Polypeptide Sequences

[0384] A polypeptide chain of a T-Cell-MP (either an unconjugated T-Cell-MPs or a T-Cell-MP-epitope conjugate) can include one or more polypeptides in addition to those described above. Suitable additional polypeptides include epitope tags, affinity domains, and fluorescent protein sequences (e.g., green fluorescent protein). The one or more additional polypeptide(s) can be included as part of a polypeptide translated by cell or cell-free system at the N-terminus of a polypeptide chain of a multimeric polypeptide, at the C-terminus of a polypeptide chain of a multimeric polypeptide, or internally within a polypeptide chain of a multimeric polypeptide.

a. Epitope Tags and Affinity Domains

[0385] Suitable epitope tags include, but are not limited to, hemagglutinin (HA; e.g., YPYDVPDYA (SEQ ID NO: 160)); c-myc (e.g., EQKLISEEDL; SEQ ID NO: 161)), and the like.

[0386] Affinity domains include peptide sequences that can interact with a binding partner, e.g., such as one immobilized on a solid support, useful for identification or purification. DNA sequences encoding multiple consecutive single amino acids, such as histidine, when fused to the expressed protein, may be used for one-step purification of the recombinant protein by high affinity binding to a resin column, such as nickel SEPHAROSE®. Exemplary affinity domains include His5 (HHHHH) (SEQ ID NO:162), HisX6 (HHHHHH) (SEQ ID NO:163), C-myc (EQKLISEEDL) (SEQ ID NO:161), Flag (DYKDDDDK) (SEQ ID NO:164, StrepTag (WSHPQFEK) (SEQ ID NO:165), hemagglutinin (e.g., HA Tag (YPYDVPDYA) (SEQ ID NO:160)), glutathione-S-transferase (GST), thioredoxin, cellulose binding domain, RYIRS (SEQ ID NO:166), FHHT (SEQ ID NO:167), chitin binding domain, S-peptide, T7 peptide, SH2 domain, C-end RNA tag, WEAAAREACCRECCARA (SEQ ID NO: 168), metal binding domains (e.g., zinc binding domains or calcium binding domains such as those from calcium-binding proteins such as calmodulin, troponin C, calcineurin B, myosin light chain, recoverin, S-modulin, visinin, VILIP, neurocalcin, hippocalcin, frequenin, caltractin, calpain large-subunit, S100 proteins, parvalbumin, calbindin D9K, calbindin D28K, and calretinin), inteins, biotin, streptavidin, MyoD, Id, leucine zipper sequences, and maltose binding protein.

b. Targeting Sequences and Their Targets

[0387] T-Cell-MPs or T-Cell-MP-epitope conjugates may include one or more targeting sequences, which are moieties, typically polypeptides or proteins, that can bind to a target such as an antigen on a cancerous cell. Targeting sequences may be located anywhere within the T-Cell-MP polypeptide, for example within, at, or near the carboxyl terminal end of a scaffold peptide (e.g., translated with the scaffold in place of a C-terminal MOD in FIG. 5 or 6 or attached to an L5 linker). In some instances the targeting sequence is part of the T-Cell-MP fusion protein and is a Fab, scFv, nanobody or the like directed to a suitable antigen. Alternatively, a targeting sequence, such as an antibody antigen-binding fragment (Fab), may be covalently or non-covalently attached to a T-Cell-MP. Covalent attachment of a targeting sequence may be made at a chemical conjugation site (e.g., a chemical conjugation site in a scaffold polypeptide), where the targeting sequence effectively becomes a payload-like molecule attached to the T-Cell-MP.

[0388] Although targeting sequences may be part of a T-Cell-MP as translated (a fusion protein) or covalently linked via a crosslinker, targeting sequences may also be non-covalently bound to a T-Cell-MP (e.g., a T-Cell-MP having a biotin labeled scaffold may be non-covalently attached to an avidin labeled targeting antibody, Fab, nanobody or the like directed to a suitable antigen). A bispecific antibody (e.g., a bispecific IgG or humanized antibody) having a first antigen binding site directed to a part of the T-Cell-MP (e.g., the scaffold) may also be employed to non-covalently attach a T-Cell-MP to a targeting sequence. The targeting sequence may then be the second bispecific antibody binding site that targets, for example, a cancer antigen. Alternatively, the second bispecific antibody binding site may be directed to, for example, the Fc domain of an antibody against a cancer antigen. Targeting sequences serve to bind or “localize” T-Cell-MPs to cells and/or tissues displaying the protein (or other molecule) to which the targeting sequence binds. In some instances, targeting sequence may be an antibody or antigen binding fragment thereof (scFv or nanobody). A targeting sequence may also be a single-chain T cell receptor (scTCR).

[0389] There are five major classes of immunoglobulins: IgA, IgD, IgE, IgG, and IgM, and several of these classes can be further divided into subclasses (isotypes), e.g., IgG1, IgG2, IgG3, IgG4, IgA, and IgA2. The subclasses can be further divided into types, e.g., IgG2a and IgG2b. Antibodies of any or all of those classes or subclasses may be used as targeting sequences, and where necessary an antibody that is from a non-human may be humanized to form a humanized immunoglobulin. The term “humanized immunoglobulin” as used herein refers to an immunoglobulin comprising portions of immunoglobulins of different origin, wherein at least one portion comprises amino acid sequences of human origin. Chimeric or CDR-grafted single chain antibodies are also encompassed by the term humanized immunoglobulin.

[0390] The terms “antibodies”, “antibody” and “immunoglobulin” include antibodies or immunoglobulins of any isotype, fragments of antibodies that retain specific binding to antigen, including, but not limited to, Fab, F(ab′)₂, Fv, scFv, and Fd fragments, chimeric antibodies, humanized antibodies, single-chain antibodies (scAb), single chain camelid (e.g., llama) antibodies, single domain antibodies (dAb), single domain heavy chain antibodies, a single domain light chain antibodies, nanobodies, diabodies, bi-specific antibodies, multi-specific antibodies, and fusion proteins comprising an antigen-binding (also referred to herein as antigen binding) portion of an antibody and a non-antibody protein. In some instances in this disclosure, specific types of antibody fragments may be recited along with the term “antibody” but it is to be understood that the terms “antibodies” and “antibody” are intended to include all such fragments.

[0391] The term “nanobody” (Nb), as used herein, refers to the smallest antigen binding fragment or single variable domain (V_{HH}) derived from naturally occurring heavy chain antibody and is known to the person skilled in the art. They are derived from heavy chain only antibodies, seen in camelids (Hamers-Casterman et al. (1993) Nature 363:446; Desmyter et al. (1996) Nature Structural Biol. 3:803; and Desmyter et al. (2015) Curr. Opin. Struct. Biol. 32:1).

[0392] “Fv” is the minimum antibody fragment that contains a complete antigen-recognition and -binding site. This region consists of a dimer of one heavy- and one light-chain variable domain in tight, non-covalent association.

[0393] “Single-chain Fv” (“sFv” or “scFv”) antibody fragments comprise the V_{H} and V_{L} domains of antibody, wherein these domains are present in a single polypeptide chain. In some embodiments, the Fv polypeptide further comprises a polypeptide linker between the VH and VL domains, which enables the scFv to form the desired structure for antigen binding. For a review of scFv, see Pluckthun in The Pharmacology of Monoclonal Antibodies, vol. 113, Rosenburg and Moore eds., Springer-Verlag, New York, pp. 269-315 (1994).

[0394] The term “diabodies” refers to small antibody fragments with two antigen-binding sites, which fragments comprise a heavy-chain variable domain (VH) connected to a light-chain variable domain (VL) in the same polypeptide chain (V_{H}-V_{L}). By using a linker that is too short to allow pairing between the two domains on the same chain, the domains are forced to pair with the complementary domains of another chain and create two antigen-binding sites. Diabodies are described more fully in, for example, EP 404,097; WO 93/11161; and Hollinger et al. (1993) Proc. Natl. Acad. Sci. USA 90:6444-6448.

[0395] As used herein, the term “CDR” or “complementarity determining region” is intended to mean the non-contiguous antigen combining sites found within the variable region of both heavy and light chain polypeptides. CDRs have been described by Kabat et al (1977) J. Biol. Chem. 252:6609; Kabat et al., U.S. Dept. of Health and Human Services, “Sequences of proteins of immunological interest” (1991) (also referred to herein as Kabat 1991); by Chothia et al. (1987) J. Mol. Biol. 196:901 (also referred to herein as Chothia 1987); and MacCallum et al. (1996) J. Mol. Biol. 262:732, where the definitions include overlapping or subsets of amino acid residues when compared against each other. Nevertheless, application of either definition to refer to a CDR of an antibody or grafted antibodies or variants thereof is intended to be within the scope of the term as defined and used herein. The amino acid residues, which encompass the CDRs, as defined by each of the above cited references are set forth in the CDR-table below as a comparison.

CDR Table

| | Kabat¹ | Chothia² | MacCallum³ |
|---|---|---|---|
| V_{H} CDR-1 | 31-35 | 26-32 | 30-35 |
| V_{H} CDR-2 | 50-65 | 53-55 | 47-58 |
| V_{H} CDR-3 | 95-102 | 96-101 | 93-101 |
| V_{L} CDR-1 | 24-34 | 26-32 | 30-36 |
| V_{L} CDR-2 | 50-56 | 50-52 | 46-55 |
| V_{L} CDR-3 | 89-97 | 91-96 | 89-96 |

¹Residue numbering follows the nomenclature of Kabat et al., 1991, supra
²Residue numbering follows the nomenclature of Chothia et al., supra
³Residue numbering follows the nomenclature of MacCallum et al., supra

[0396] As used herein, the terms “CDR-L1”, “CDR-L2”, and “CDR-L3” refer, respectively, to the first, second, and third CDRs in a light chain variable region. The terms “CDR-L1”, “CDR-L2”, and “CDR-L3” may be used interchangeably with “VL CDR1,” “VL CDR2,” and “VL CDR3,” respectively. As used herein, the terms “CDR-H1”, “CDR-H2”, and “CDR-H3” refer, respectively, to the first, second, and third CDRs in a heavy chain variable region. The terms “CDR-H1”, “CDR-H2”, and “CDR-H3” may be used interchangeably with “VH CDR1,” “VH CDR2,” and “VH CDR3,” respectively. As used herein, the terms “CDR-1”, “CDR-2”, and “CDR-3” refer, respectively, to the first, second and third CDRs of either chain's variable region.

[0397] T cell receptors, or portions thereof such as the TCR beta chains, also may be used as targeting sequences. A single chain TCR (“scTCR”) may also be utilized as a targeting sequence. scTCRs include an alpha chain variable region (Vα) and a beta chain variable region (Vβ) covalently linked through a suitable peptide linker sequence. For example, the Vα can be covalently linked to the VB through a suitable peptide linker (L) sequence fused to the C-terminus of the Vα and the N-terminus of the Vβ. A scTCR can have the structure Vα-L-Vβ. A scTCR can have the structure Vβ-L-Vα. A scTCR can also comprise a constant domain (also referred to as constant region). In some cases, a scTCR comprises, in order from N-terminus to C-terminus: i) a TCR α chain variable domain polypeptide; ii) a peptide linker; iii) a TCR β chain variable domain polypeptide; and iv) a TCR β chain constant region extracellular domain polypeptide. In some cases, a scTCR comprises, in order from N-terminus to C-terminus: i) a TCR β chain variable domain polypeptide; ii) a peptide linker; iii) a TCR α chain variable domain polypeptide; and iv) a TCR α chain constant region extracellular domain polypeptide.

[0398] As discussed above, a T-Cell-MP or T-Cell-MP-epitope conjugate may include, or have attached to the T-Cell-MP, a targeting sequence such as a targeting sequence specific for a cancer-associated epitope (i.e., a cancer targeting polypeptide or “CTP”). For example, the first and/or the second polypeptide of a duplex T-Cell-MP-epitope conjugate may have independently selected targeting sequences such as CTPs attached. A “cancer-associated” epitope is an epitope that is present in a cancer-associated antigen. In some cases, a CTP is an antibody. In some cases, a CTP is a T cell receptor (e.g., a TCR beta chain or a TCR single-chain T cell receptor (scTCR)). Alternatively, instead of targeting a cancer antigen, a targeting sequence present in a T-Cell-MP may target an antigen of an infecting coronavirus (e.g., MERS-CoV, Bat-SL-CoV, SARS-CoV, and SARS-CoV-2 (COVID-19)) protein that is expressed on the surface of an infected cell. Non-limiting examples of targeting antibodies (or antigen binding fragments thereof) that can be included in a T-Cell-MP include, but are not limited to, antibodies against the coronavirus structural proteins, spike, nucleocapsid, membrane and envelope, which have homologues in all coronaviruses. Tan et al., Antiviral, 65 (2): 69-78 (2005).

[0399] For example, some coronavirus spike protein may be present on the surface of infected cells according to Heald-Sargent and Gallager, Viruses 4:557-580 (2012). Even if not present on an infected cell surface due to expression within a cell, the portion of a viral protein that is exposed on the coronavirus may be targeted as the virus binds to a cell protein as part of its entry into a cell, particularly when therapeutics inhibit endocytosis of coronavirus are co-administered. For example, heparin sulfate proteoglycan (HAPG)-assisted endocytosis of coronaviruses may be inhibited by mitoxantrone, which targets HSPGs directly, and Sunitinib and BNTX disrupt the actin network to impair HSPG-assisted viral entry. While the use of targeting sequences that bind to proteins of the viral envelope may cause scavenging of some portion of the T-Cell-MP-epitope conjugate, binding to the targeting sequence may effectively neutralize the virus, and the T-Cell-MP-epitope conjugate may still act to present epitope and MOD(s) to target specific T cells. Examples of monoclonal antibodies that may be utilized for such targeting include bamlanivimab, etesevimab, casirivimab, imdevimab, and sotrovimab all directed to the spike protein of Covid-19.

[0400] Where it is desirable to specifically direct the T-Cell-MP to a virus infected cell, such as with a redirected T-Cell-MP-epitope conjugate, the targeting sequence may be directed to a coronavirus peptide epitope-MHC complex (peptide epitope-HLA complex). Such MHC-epitope complexes may be targeted by, for example, a single-chain TCR, a monoclonal antibody, a scFv, a nanobody targeting sequence, or the like. The peptide of the peptide epitope-MHC complex may be an epitope of a coronavirus structural protein such as the spike, nucleocapsid, membrane, or envelope proteins.

[0401] Some suitable epitopes of spike and other coronavirus proteins that may be directly targeted with, for example, monoclonal antibodies or antigen binding fragments thereof, or are provided in FIGS. 21 and 22 and in Tables 2 and 3. Antibodies or antigen binding fragments thereof may also be used to target HLA peptide complexes comprising the peptide epitopes in FIGS. 21 and 22 and in Tables 2 and 3.

[0402] As an alternative, the targeting sequence of T-Cell-MPs may be directed to an antigen present in tissues likely to be infected by coronaviruses such as alveolar epithelial cells. Alveolar epithelial cells are generally divided into alveolar epithelial type 1 (ATI) and alveolar epithelial type II cells (ATII). Upon injury to lung epithelium ATII cells have the ability to act as progenitor cells giving rise to ATI cells and additional ATII cells Gonzales et al. J Histochem Cytochem. 58 (10): 891-901 (2010). Suitable apical plasma membrane proteins of ATI cells that may be targeted include, for example, hTIa-2, gp36 and Human type I cell 56-kDa protein (McElroy and Kasper, Eur Respir J, 24:664-673 (2004). Apical plasma membrane proteins of ATII cells include, for example, HTII-280 (Gonzales loc. cit.).

### (i) Targets

[0403] In some cases, a targeting sequence is a CTP that targets a cancer-associated antigen. In some cases, the target of a CTP is a peptide/HLA (pHLA) complex on the surface of a cancer cell, where the peptide can be a cancer-associated peptide (e.g., a peptide fragment of a cancer-associated antigen). See, e.g., Tebentafusp, which targets gp 100 peptide (positions 280-288) that is presented on HLA-A*02:01 with picomolar affinity (gp 100 is a lineage melanocytic antigen expressed in melanocytes and melanoma).

### (a) Cancer-Associated Antigens

[0404] Cancer-associated antigens that can be targeted with a CTP include, e.g., NY-ESO (New York Esophageal Squamous Cell Carcinoma 1 or 2), melanoma antigen recognized by T cells or “MART” (e.g., MART-1, also known as Melan-A, or MELANA), HPV (human papilloma virus) E6, BCMA (B-cell maturation antigen), CD123, CD133, CD171, CD19, CD20, CD22, CD30, CD33, CD38, CD138, CEA (carcinoembryonic antigen), EGFR (epidermal growth factor receptor), EGFRvIII (epidermal growth factor receptor variant III), EpCAM (epithelial cell adhesion molecule), EphA2 (ephrin type-A receptor 2), disialoganglioside GD2, GPC3 (glypican-3), HER2, IL 13Ralpha2 (Interleukin 13 receptor subunit alpha-2), LeY (a difucosylated type 2 blood group-related antigen), melanoma-associated antigen(s) or “MAGE” (e.g., MAGE A3 or MAGE A4), melanoma glycoprotein, mesothelin, MUC1 (mucin 1), MUC16 (mucin-16), myelin, NKG2D (Natural Killer Group 2D) ligands, PSMA (prostate specific membrane antigen), and ROR1 (type I receptor tyrosine kinase-like orphan receptor).

[0405] Cancer-associated antigens that can be targeted with a CTP present in a T-Cell-MP include, but are not limited to, 17-1A-antigen, alpha-fetoprotein (AFP), alpha-actinin-4, A3, antigen specific for A33 antibody, ART-4, B7, Ba 733, BAGE, bcl-2, bcl-6, BCMA, BrE3-antigen, CA125, CAMEL, CAP-1, carbonic anhydrase IX (CAIX), CASP-8/m, CCL19, CCL21, CD1, CD1a, CD2, CD3, CD4, CD5, CD8, CD11A, CD14, CD15, CD16, CD18, CD19, CD20, CD21, CD22, CD23, CD25, CD29, CD30, CD32b, CD33, CD37, CD38, CD40, CD40L, CD44, CD45, CD46, CD52, CD54, CD55, CD59, CD64, CD66a-e, CD67, CD70, CD70L, CD74, CD79a, CD79b, CD80, CD83, CD95, CD123, CD126, CD132, CD133, CD138, CD147, CD154, CD171, CDC27, CDK-4/m, CDKN2A, CEA, CEACAM5, CEACAM6, claudin (e.g., claudin-1, claudin-10, claudin-18 (e.g., claudin-18, isoform 2)), complement factors (such as C3, C3a, C3b, C5a and C5), colon-specific antigen-p (CSAp), c-Met, CTLA-4, CXCR4, CXCR7, CXCL12, DAM, Dickkopf-related protein (DKK), ED-B fibronectin, epidermal growth factor receptor (EGFR), EGFRvIII, EGP-1 (TROP-2), EGP-2, ELF2-M, Ep-CAM, EphA2, EphA3, fibroblast activation protein (FAP), fibroblast growth factor (FGF), Flt-1, Flt-3, folate binding protein, folate receptor, G250 antigen, gangliosides (such as GC2, GD3 and GM2), GAGE, GD2, gp100, GPC3, GRO-13, HLA-DR, HM1.24, human chorionic gonadotropin (HCG) and its subunits, HER2, HER3, HMGB-1, hypoxia inducible factor (HIF-1), HIF-1a, HSP70-2M, HST-2, Ia, IFN-gamma, IFN-alpha, IFN-beta, IFN-X, IL-4R, IL-6R, IL-13R, IL13Ralpha2, IL-15R, IL-17R, IL-18R, IL-2, IL-6, IL-8, IL-12, IL-15, IL-17, IL-18, IL-23, IL-25, ILGF, ILGF-1R, insulin-like growth factor-1 (IGF-1), IGF-1R, integrin αVβ3, integrin α5β1, KC4-antigen, killer-cell Ig-like receptor (KIR), Kras, KS-1-antigen, KS1-4, LDR/FUT, Le^{gamma}, macrophage migration inhibitory factor (MIF), MAGE (e.g., MAGE A1, MAGE A2, MAGE A2B, MAGE A3, MAGE A4, MAGE A6, MAGE A8, MAGE A9, MAGE A9B, MAGE A10, MAGE A11, MAGE A12, MAGE C1, MAGE C2 in Human Genome Nomenclature Committee or “HGNC” abbreviations), MART-1, MART-2, mCRP, MCP-1, melanoma glycoprotein, mesothelin, MIP-1A, MIP-1B, MIF, mucins (such as MUC1, MUC2, MUC3, MUC4, MUC5ac, MUC13, MUC16, MUM-1/2 and MUM-3), NCA66, NCA95, NCA90, Nectin-4, NY-ESO-1, NY-ESO2, PAM4 antigen, pancreatic cancer mucin, PD-1, PD-L1, PD-1 receptor, placental growth factor, p53, PLAGL2, prostatic acid phosphatase, PSA, PRAME, PSMA, P1GF, RSS, RANTES, SAGE, 5100, survivin, survivin-2B, T101, TAC, TAG-72, tenascin, Thomson-Friedenreich antigens, Tn antigen, TNF-alpha, tumor necrosis antigens, TRAG-3, TRAIL receptors, vascular endothelial growth factor (VEGF), VEGF receptor (VEGFR) and WT-1.

[0406] In some cases, the cancer-associated antigen is an antigen associated with a hematological cancer. Examples of such antigens include, but are not limited to, BCMA, C5, CD19, CD20, CD22, CD25, CD30, CD33, CD38, CD40, CD45, CD52, CD56, CD66, CD74, CD79a, CD79b, CD80, CD138, CTLA-4, CXCR4, DKK, EphA3, GM2, HLA-DR beta, integrin αVβ3, IGF-R1, IL6, KIR, PD-1, PD-L1, TRAILR1, TRAILR2, transferrin receptor, and VEGF. In some cases, the cancer-associated antigen is an antigen expressed by malignant B cells, such as CD19, CD20, CD22, CD25, CD38, CD40, CD45, CD74, CD80, CTLA-4, IGF-R1, IL6, PD-1, TRAILR2, or VEGF.

[0407] In some cases, the cancer-associated antigen is MAGE A4 or NY-ESO-1 (e.g., NY-ESO-1B).

[0408] In some cases, the cancer-associated antigen is an antigen associated with a solid tumor. Examples of such antigens include, but are not limited to, CAIX, cadherins, CEA, c-MET, CTLA-4, EGFR family members, EpCAM, EphA3, FAP, folate-binding protein, FR-alpha, gangliosides (such as GC2, GD3 and GM2), HER2, HER3, IGF-1R, integrin αVβ3, integrin α5β1, Le^{gamma}, Liv1, mesothelin, mucins, NaPi2b, PD-1, PD-L1, PD-1 receptor, pgA33, PSMA, RANKL, ROR1, TAG-72, tenascin, TRAILR1, TRAILR2, VEGF, VEGFR, and others listed above.

### (1) Peptide/HLA Complexes

[0409] In some cases, the target of a CTP is a peptide/HLA (pHLA) complex on the surface of a cancer cell, where the peptide can be a cancer-associated peptide (e.g., a peptide fragment of a cancer-associated antigen). Cancer-associated peptides are known in the art. In some cases, a cancer-associated peptide is bound to an HLA complex comprising an HLA-A*0201 heavy chain and a β2M polypeptide.

[0410] In some cases, the epitope present in the pHLA on the surface of a cancer cell is bound to an HLA complex comprising an HLA heavy chain such as HLA-A*0101, A*0201, A*0301, A*1101, A*2301, A*2402, A*2407, A*3303, and/or A*3401. In some cases, the epitope present in the pHLA on the surface of a cancer cell is bound to an HLA complex comprising an HLA heavy chain such as HLA-B*0702, B*0801, B*1502, B*3802, B*4001, B*4601, and/or B*5301. In some cases, the epitope present in the pHLA on the surface of a cancer cell is bound to an HLA complex comprising an HLA heavy chain such as C*0102, C*0303, C*0304, C*0401, C*0602, C*0701, C*702, C*0801, and/or C*1502.

[0411] In some cases, the epitope is a cancer-associated epitope of any one of the following cancer-associated antigens: a MUC1 polypeptide, an LMP2 polypeptide, an epidermal growth factor receptor (EGFR) vIII polypeptide, a HER-2/neu polypeptide, a melanoma associated antigen-1 (MAGE A1) polypeptide, a melanoma associated antigen family A3 (MAGE A3) polypeptide, a melanoma associated antigen family A4 (MAGE A4) polypeptide, a p53 polypeptide, a mutant p53 polypeptide, an NY-ESO-1 or 2 polypeptide, a folate hydrolase (prostate-specific membrane antigen; PSMA) polypeptide, a carcinoembryonic antigen (CEA) polypeptide, a claudin polypeptide (e.g., claudin-1, claudin-10, claudin-18 (e.g., claudin-18, isoform 2)), a Nectin-4 polypeptide, a melanoma antigen recognized by T-cells (melanA/MART1) polypeptide, a Ras polypeptide, a gp 100 polypeptide, a proteinase3 (PR1) polypeptide, a bcr-abl polypeptide, a tyrosinase polypeptide, a survivin polypeptide, a prostate specific antigen (PSA) polypeptide, an hTERT polypeptide, a sarcoma translocation breakpoints polypeptide, a synovial sarcoma X (SSX) breakpoint polypeptide, an EphA2 polypeptide, an acid phosphatase, prostate (PAP) polypeptide, a melanoma inhibitor of apoptosis (ML-IAP) polypeptide, an epithelial cell adhesion molecule (EpCAM) polypeptide, an ERG (TMPRSS2 ETS fusion) polypeptide, a NA17 polypeptide, a paired-box-3 (PAX3) polypeptide, an anaplastic lymphoma kinase (ALK) polypeptide, an androgen receptor polypeptide, a cyclin B1 polypeptide, an N-myc proto-oncogene (MYCN) polypeptide, a Ras homolog gene family member C (RhoC) polypeptide, a tyrosinase-related protein-2 (TRP-2) polypeptide, a mesothelin polypeptide, a prostate stem cell antigen (PSCA) polypeptide, a cytochrome P450 1B1 (CYP1B1) polypeptide, a placenta-specific protein 1 (PLAC1) polypeptide, a BORIS polypeptide (also known as CCCTC-binding factor or CTCF), an ETV6-AML polypeptide, a breast cancer antigen NY-BR-1 polypeptide (also referred to as ankyrin repeat domain-containing protein 30A), a regulator of G-protein signaling (RGS5) polypeptide, a squamous cell carcinoma antigen recognized by T-cells (SART3) polypeptide, a carbonic anhydrase IX polypeptide, a paired box-5 (PAX5) polypeptide, an OY-TES1 (testis antigen; also known as acrosin binding protein) polypeptide, a sperm protein 17 polypeptide, a lymphocyte cell-specific protein-tyrosine kinase (LCK) polypeptide, a high molecular weight melanoma associated antigen (HMW-MAA), an A-kinase anchoring protein-4 (AKAP-4), a synovial sarcoma X breakpoint 2 (SSX2) polypeptide, an X antigen family member 1 (XAGE1) polypeptide, a B7 homolog 3 (B7H3; also known as CD276) polypeptide, a legumain polypeptide (LGMN1; also known as asparaginyl endopeptidase), a tyrosine kinase with Ig and EGF homology domains-2 (Tie-2; also known as angiopoietin-1 receptor) polypeptide, a P antigen family member 4 (PAGE4) polypeptide, a vascular endothelial growth factor receptor 2 (VEGF2) polypeptide, a MAD-CT-1 polypeptide, a fibroblast activation protein (FAP) polypeptide, a platelet derived growth factor receptor beta (PDGFB) polypeptide, a MAD-CT-2 polypeptide, a Fos-related antigen-1 (FOSL) polypeptide; a human papilloma virus (HPV) antigen; an alpha-fetoprotein (AFP) antigen; and a Wilms tumor-1 (WT1) antigen.

[0412] For example, in some cases, a CTP binds to: a) a WT-1 peptide bound to an HLA complex comprising an HLA heavy chain (e.g., an HLA-A*0201 heavy chain or an HLA-A*2402 heavy chain) and a β2M polypeptide; b) an HPV peptide bound to an HLA complex comprising a class I HLA heavy chain and a β2M polypeptide; c) a mesothelin peptide bound to an HLA complex comprising a class I HLA heavy chain and a β2M polypeptide; d) a Her2 peptide bound to an HLA complex comprising a class I HLA heavy chain and a β2M polypeptide; or e) a BCMA peptide bound to an HLA complex comprising a class I HLA heavy chain and a β2M polypeptide.

[0413] In some cases, a cancer-associated peptide is a peptide of a mesothelin polypeptide having at least 90%, at least 95%, at least 98%, at least 99%, or 100%, amino acid sequence identity to the following mesothelin amino acid sequence:

[0414] LAGE TGQEAAPLDG VLANPPNISS LSPRQLLGFP CAEVSGLSTE RVRELAVALA QKNVKLSTEQ LRCLAHRLSE PPEDLDALPL DLLLFLNPDA FSGPQACTRF FSRITKANVD LLPRGAPERQ RLLPAALACW GVRGSLLSEA DVRALGGLAC DLPGRFVAES AEVLLPRLVS CPGPLDQDQQ EAARAALQGG GPPYGPPSTW SVSTMDALRG LLPVLGQPII RSIPQGIVAA WRQRSSRDPS WRQPERTILR PRFRREVEKT ACPSGKKARE IDESLIFYKK WELEACVDAA LLATQMDRVN AIPFTYEQLD VLKHKLDELY PQGYPESVIQ HLGYLFLKMS PEDIRKWNVT SLETLKALLE VNKGHEMSPQ VATLIDRFVK GRGQLDKDTL DTLTAFYPGY LCSLSPEELS SVPPSSIWAV RPQDLDTCDP RQLDVLYPKA RLAFQNMNGS EYFVKIQSFL GGAPTEDLKA LSQQNVSMDL ATFMKLRTDA VLPLTVAEVQ KLLGPHVEGL KAEERHRPVR DWILRQRQDD LDTLGLGLQG GIPNGYLVLD LSMQEALSGT PCLLGPGPVL TVLALLLAST LA (SEQ ID NO:169). For example, a mesothelin peptide present in a pHLA complex can be: i) KLLGPHVEGL (SEQ ID NO:170); ii) AFYPGYLCSL (SEQ ID NO:171), which can bind HLA-A*2402/32M; iii) VLPLTVAEV (SEQ ID NO:172); iv) ELAVALAQK (SEQ ID NO:173); v) ALQGGGPPY (SEQ ID NO: 174); vi) FYPGYLCSL (SEQ ID NO:175); vii) LYPKARLAF (SEQ ID NO:176); viii) LLFLLFSLGWVGPSR (SEQ ID NO: 177); ix) VNKGHEMSPQAPRRP (SEQ ID NO:178); x) FMKLRTDAVLPLTVA (SEQ ID NO:179); or xi) DAALLATQMD (SEQ ID NO:180).

[0415] In some cases, a cancer-associated peptide is a peptide of a Her2 polypeptide having at least 90%, at least 95%, at least 98%, at least 99%, or 100%, amino acid sequence identity to the following Her2 (receptor tyrosine-protein kinase erbB2) amino acid sequence:

(SEQ ID NO: 181)

MELAALCRWG LLLALLPPGA ASTQVCTGTD MKLRLPASPE
THLDMLRHLY QGCQVVQGNL ELTYLPTNAS LSFLQDIQEV
QGYVLIAHNQ VRQVPLQRLR IVRGTQLFED NYALAVLDNG
DPLNNTTPVT GASPGGLREL QLRSLTEILK GGVLIQRNPQ
LCYQDTILWK DIFHKNNQLA LTLIDTNRSR ACHPCSPMCK
GSRCWGESSE DCQSLTRTVC AGGCARCKGP LPTDCCHEQC
AAGCTGPKHS DCLACLHFNH SGICELHCPA LVTYNTDTFE
SMPNPEGRYT FGASCVTACP YNYLSTDVGS CTLVCPLHNQ
EVTAEDGTQR CEKCSKPCAR VCYGLGMEHL REVRAVTSAN
IQEFAGCKKI FGSLAFLPES FDGDPASNTA PLQPEQLQVF
ETLEEITGYL YISAWPDSLP DLSVFQNLQV IRGRILHNGA
YSLTLQGLGI SWLGLRSLRE LGSGLALIHH NTHLCFVHTV
PWDQLFRNPH QALLHTANRP EDECVGEGLA CHQLCARGHC
WGPGPTQCVN CSQFLRGQEC VEECRVLQGL PREYVNARHC
LPCHPECQPQ NGSVTCFGPE ADQCVACAHY KDPPFCVARC
PSGVKPDLSY MPIWKFPDEE GACQPCPINC THSCVDLDDK
GCPAEQRASP LTSIISAVVG ILLVVVLGVV FGILIKRRQQ
KIRKYTMRRL LQETELVEPL TPSGAMPNQA QMRILKETEL
RKVKVLGSGA FGTVYKGIWI PDGENVKIPV AIKVLRENTS
PKANKEILDE AYVMAGVGSP YVSRLLGICL TSTVQLVTQL
MPYGCLLDHV RENRGRLGSQ DLLNWCMQIA KGMSYLEDVR
LVHRDLAARN VLVKSPNHVK ITDFGLARLL DIDETEYHAD
GGKVPIKWMA LESILRRRFT HQSDVWSYGV TVWELMTFGA
KPYDGIPARE IPDLLEKGER LPQPPICTID VYMIMVKCWM
IDSECRPRFR ELVSEFSRMA RDPQRFVVIQ NEDLGPASPL
DSTFYRSLLE DDDMGDLVDA EEYLVPQQGF FCPDPAPGAG
GMVHHRHRSS STRNM.

[0416] In some cases, a cancer-associated peptide is a peptide of a BCMA polypeptide having at least 90%, at least 95%, at least 98%, at least 99%, or 100%, amino acid sequence identity to the following BCMA amino acid seQuence:

(SEQ ID NO: 182)

[sequence omitted]

[0417] In some cases, a cancer-associated peptide is a peptide of a WT-1 polypeptide having at least 90%, at least 95%, at least 98%, at least 99%, or 100%, amino acid sequence identity to the following WT-1 amino acid sequence:

(SEQ ID NO: 183)

MDFLLLQDPA STCVPEPASQ HTLRSGPGCL QQPEQQGVRD
PGGIWAKLGA AEASAERLQG RRSRGASGSE PQQMGSDVRD
LNALLPAVPS LGGGGGCALP VSGAAQWAPV LDFAPPGASA
YGSLGGPAPP PAPPPPPPPP PHSFIKQEPS WGGAEPHEEQ
CLSAFTVHFS GQFTGTAGAC RYGPFGPPPP SQASSGQARM
FPNAPYLPSC LESQPAIRNQ GYSTVTFDGT PSYGHTPSHH
AAQFPNHSFK HEDPMGQQGS LGEQQYSVPP PVYGCHTPTD
SCTGSQALLL RTPYSSDNLY QMTSQLECMT WNQMNLGATL
KGHSTGYESD NHTTPILCGA QYRIHTHGVF RGIQDVRRVP
GVAPTLVRSA SETSEKRPFM CAYPGCNKRY FKLSHLQMHS
RKHTGEKPYQ CDFKDCERRF SRSDQLKRHQ RRHTGVKPFQ
CKTCQRKFSR SDHLKTHTRT HTGEKPFSCR WPSCQKKFAR
SDELVRHHNM HQRNMTKLQL AL.

[0418] Non-limiting examples of WT-1 peptides include RMFPNAPYL (SEQ ID NO: 184), CMTWNQMN (SEQ ID NO: 185), CYTWNQMNL (SEQ ID NO: 186), CMTWNQMNLGATLKG (SEQ ID NO: 187), WNQMNLGATLKGVAA (SEQ ID NO: 188), CMTWNYMNLGATLKG (SEQ ID NO:189), WNYMNLGATLKGVAA (SEQ ID NO:190), MTWNQMNLGATLKGV (SEQ ID NO:191), TWNQMNLGATLKGVA (SEQ ID NO:192), CMTWNLMNLGATLKG (SEQ ID NO: 193), MTWNLMNLGATLKGV (SEQ ID NO:194), TWNLMNLGATLKGVA (SEQ ID NO:195), WNLMNLGATLKGVAA (SEQ ID NO: 196), MNLGATLK (SEQ ID NO:197), MTWNYMNLGATLKGV (SEQ ID NO: 198), TWNYMNLGATLKGVA (SEQ ID NO:199), CMTWNQMNLGATLKGVA (SEQ ID NO:200), CMTWNLMNLGATLKGVA (SEQ ID NO:201), CMTWNYMNLGATLKGVA (SEQ ID NO:202), GYLRNPTAC (SEQ ID NO: 203), GALRNPTAL (SEQ ID NO:204), YALRNPTAC (SEQ ID NO:205), GLLRNPTAC (SEQ ID NO:206), RYRPHPGAL (SEQ ID NO:207), YQRPHPGAL (SEQ ID NO:208), RLRPHPGAL (SEQ ID NO:209), RIRPHPGAL (SEQ ID NO:210), QFPNHSFKHEDPMGQ (SEQ ID NO:211), HSFKHEDPY (SEQ ID NO:212), QFPNHSFKHEDPM (SEQ ID NO:213), QFPNHSFKHEDPY (SEQ ID NO:214), KRPFMCAYPGCNK (SEQ ID NO:215), KRPFMCAYPGCYK (SEQ ID NO:216), FMCAYPGCY (SEQ ID NO:217), FMCAYPGCK (SEQ ID NO:218), KRPFMCAYPGCNKRY (SEQ ID NO:219), SEKRPFMCAYPGCNK (SEQ ID NO:220), KRPFMCAYPGCYKRY (SEQ ID NO: 221), NLMNLGATL (SEQ ID NO:222), and NYMNLGATL (SEQ ID NO:223).

[0419] In some cases, a cancer-associated peptide is a peptide of a human papillomavirus (HPV) polypeptide having at least 90%, at least 95%, at least 98%, at least 99%, or 100%, amino acid sequence identity to an HPV polypeptide. An HPV peptide can be a peptide of an HPV E6 polypeptide or an HPV E7 polypeptide. The HPV epitope can be an epitope of HPV of any of a variety of genotypes, including, e.g., HPV16, HPV18, HPV31, HPV33, HPV35, HPV39, HPV45, HPV51, HPV52, HPV56, HPV58, HPV59, HPV68, HPV73, or HPV82. Non-limiting examples of HPV peptides include: E6 18-26 (KLPQLCTEL; SEQ ID NO:224); E6 26-34 (LQTTIHDII; SEQ ID NO: 225); E6 49-57 (VYDFAFRDL; SEQ ID NO:226); E6 52-60 (FAFRDLCIV; SEQ ID NO:227); E6 75-83 (KFYSKISEY; SEQ ID NO:228); E6 80-88 (ISEYRHYCY; SEQ ID NO:229); E7 7-15 (TLHEYMLDL; SEQ ID NO:230); E7 11-19 (YMLDLQPET; SEQ ID NO:231); E7 44-52 (QAEPDRAHY; SEQ ID NO:232); E7 49-57 (RAHYNIVTF (SEQ ID NO:233); E7 61-69 (CDSTLRLCV; SEQ ID NO:234); E7 67-76 (LCVQSTHVDI; SEQ ID NO:235); E7 82-90 (LLMGTLGIV; SEQ ID NO:236); E7 86-93 (TLGIVCPI; SEQ ID NO:237); and E7 92-93 (LLMGTLGIVCPI; SEQ ID NO: 238).

[0420] In some cases, a cancer-associated peptide is a peptide of a claudin polypeptide having at least 90%, at least 95%, at least 98%, at least 99%, or 100%, amino acid sequence identity to the following claudin-18 (isoform 2) (CLDN 18.2) amino acid sequence:

(SEQ ID NO: 239)

MAVTACQGLG FWVSLIGIAG IIAATCMDQW STQDLYNNPV
TAVFNYQGLW RSCVRESSGF TECRGYFTLL GLPAMLQAVR
ALMIVGIVLG AIGLLVSIFA LKCIRIGSME DSAKANMTLT
SGIMFIVSGL CAIAGVSVFA NMLVTNFWMS TANMYTGMGG
MVQTVQTRYT FGAALFVGWV AGGLTLIGGV MMCIACRGLA
PEETNYKAVS YHASGHSVAY KPGGFKASTG FGSNTKNKKI
YDGGARTEDE VQSYPSKHDY V.

[0421] In some cases, a cancer-associated peptide is a peptide of a claudin polypeptide having the amino acid sequence TEDEVQSYPSKHDYV (SEQ ID NO:240) (and having a length of about 15 amino acids) or EVQSYPSKHDYV (SEQ ID NO: 241) (and having a length of about 12 amino acids.

[0422] In some cases, a cancer-associated peptide is a peptide of a trophoblast cell-surface antigen-2 (Trop-2) polypeptide. Trop-2 (also known as epithelial glycoprotein-1, gastrointestinal tumor-associated antigen GA733-1, membrane component chromosome 1 surface marker-1, and tumor-associated calcium signal transducer-2) is a transmembrane glycoprotein that is upregulated in numerous cancer types, and is the protein product of the TACSTD2 gene. In some cases, a cancer-associated peptide is a peptide of a TROP-2 polypeptide having at least 90%, at least 95%, at least 98%, at least 99%, or 100%, amino acid sequence identity to the following TROP-2 amino acid sequence: [sequence omitted] (SEQ ID NO:242).

### (ii) Antibodies as Targeting Sequences

[0423] As noted above, in some cases, a targeting sequence such as a CTP is an antibody. In some cases, the CTP is an antibody specific for a peptide/HLA complex on the surface of a cancer cell, where the peptide can be a cancer-associated peptide (e.g., a peptide of a cancer-associated antigen).

[0424] Non-limiting examples of cancer-associated antigen-targeted antibodies include, but are not limited to, abituzumab (anti-CD51), LL1 (anti-CD74), LL2 or RFB4 (anti-CD22), veltuzumab (hA20, anti-CD20), obinutuzu (anti-CD20), obinutuzumab (GA101, anti-CD20), daratumumab (anti-CD38), lambrolizumab (anti-PD-1 receptor), nivolumab (anti-PD-1 receptor), ipilimumab (anti-CTLA-4), RS7 (anti-TROP-2), PAM4 or KC4 (both anti-mucin), MN-14 (anti-CEA), MN-15 or MN-3 (anti-CEACAM6), Mu-9 (anti-colon-specific antigen-p), Immu 31 (anti-alpha-fetoprotein), R1 (anti-IGF-1R), A19 (anti-CD19), TAG-72 (e.g., CC49), Tn, J591 or HuJ591 (anti-PSMA), AB-PG1-XG1-026 (anti-PSMA dimer), D2/B (anti-PSMA), G250 (anti-carbonic anhydrase IX), L243 (anti-HLA-DR) alemtuzumab (anti-CD52), oportuzumab (anti-EpCAM), bevacizumab (anti-VEGF), cetuximab (anti-EGFR), gemtuzumab (anti-CD33), ibritumomab tiuxetan (anti-CD20); panitumumab (anti-EGFR); tositumomab (anti-CD20); PAM4 (also known as clivatuzumab; anti-mucin), trastuzumab (anti-HER2), pertuzumab (anti-HER2), polatuzumab (anti-CD79b), and anetumab (anti-mesothelin).

[0425] In some cases, the targeting sequence (e.g., CTP) comprises a single-chain antibody. In some cases, the targeting sequence (e.g., CTP) is a scFv. In some cases, the targeting sequence (e.g., CTP) is a nanobody (also referred to as a single domain antibody (sdAb). In some cases, t targeting sequence (e.g., CTP) is a heavy chain nanobody. In some cases, the targeting sequence (e.g., CTP) is a light chain nanobody.

[0426] VH and VL amino acid sequences of various tumor antigen-binding antibodies are known in the art, as are the light chain and heavy chain CDRs of such antibodies. See, e.g., Ling et al. (2018) Frontiers Immunol. 9:469; WO 2005/012493; US 2019/0119375; US 2013/0066055. The following are non-limiting examples of tumor antigen-binding antibodies.

### (1) Anti-Her2

[0427] In some cases, an anti-Her2 antibody comprises: a) a light chain comprising an amino acid sequence having at least 90%, at least 95%, at least 98%, at least 99%, or 100%, amino acid sequence identity to the following amino acid sequence: DIQMTQSPSSLSASVGDRVTITCRASQDVNTAVAWYQQKPGKAPKLLIYSASFLYSGVPSRF SGSRSGTDFTLTISSLQPEDFATYYCQQHYTTPPTFGQGTKVEIKRTVAAPSVFIFPPSDEQLKSGTASVVCLLNNFYP REAKVQWKVDNALQSGNSQESVTEQDSKDSTYSLSSTLTLSKADYEKHKVYACEVTHQGLSSPVTKSFNRGEC (SEQ ID NO:243); and b) a heavy chain comprising an amino acid sequence having at least 90%, at least 95%, at least 98%, at least 99%, or 100%, amino acid sequence identity to the following amino acid sequence: EVOLVESGG GLVQPGGSLRLSCAASGFNIKDTYIHWVRQAPGKGLEWVARIYPTNGYTRYADSVKGRFTISADTSKNTAYLQMNSL RAEDTAVYYCSRWGGDGFYAMDYWGQGTLVTVSSASTKGPSVFPLAPSSKSTSGGTAALGCLVKDYFPEPVTVSW NSGALTSGVHTFPAVLQSSGLYSLSSVVTVPSSSLGTQTYICNVNHKPSNTKVDKKVEPKSCDKTHTCPPCPAPELL GGPSVFLFPPKPKDTLMISRTPEVTCVVVDVSHEDPEVKFNWYVDGVEVHNAKTKPREEQYNSTYRVVSVLTVLHQ DWLNGKEYKCKVSNKALPAPIEKTISKAKGQPREPQVYTLPPSREEMTKNQVSLTCLVKGFYPSDIAVEWESNGQPE NNYKTTPPVLDSDGSFFLYSKLTVDKSRWQQGNVFSCSVMHEALHNHYTQKSLSLSPGK (SEQ ID NO:244).

[0428] In some cases, an anti-Her2 antibody comprises a light chain variable region (VL) present in the light chain amino acid sequence provided above; and a heavy chain variable region (VH) present in the heavy chain amino acid sequence provided above. For example, an anti-Her2 antibody can comprise: a) a VL comprising an amino acid sequence having at least 90%, at least 95%, at least 98%, at least 99%, or 100%, amino acid sequence identity to the amino acid sequence: DIQMTQSPSSLSASVGDRVTITCRASQDVNTAVAWYQQKPGKAPKLLIYSASFLYSG VPSRFSGSRSGTDFTLTISSLQPEDFATYYCQQHYTTPPTFGQGTKVEIK (SEQ ID NO:245); and b) a VH comprising an amino acid sequence having at least 90%, at least 95%, at least 98%, at least 99%, or 100%, amino acid sequence identity to the amino acid sequence: EVOLVESGGGLVQPGGSLRLSCAASGFNIKDTYIHWVRQ APGKGLEWVARIYPTNGYTRYADSVKGRFTISADTSKNTAYLQMNSLRAEDTAVYYCSRWGGDGFYAMDYWGQGT LVTVSS (SEQ ID NO:246). In some cases, an anti-Her2 antibody comprises, in order from N-terminus to C-terminus: a) a VH comprising an amino acid sequence having at least 90%, at least 95%, at least 98%, at least 99%, or 100%, amino acid sequence identity to the amino acid sequence: EVOLVESGGGLVQPGGSLRLSCAASGFNIKDTYIHW VRQAPGKGLEWVARIYPTNGYTRYADSVKGRFTISADTSKNTAYLQMNSLRAEDTAVYYCSRWGGDGFYAMDYWG QGTLVTVSS (SEQ ID NO:246); b) a linker; and c) a VL comprising an amino acid sequence having at least 90%, at least 95%, at least 98%, at least 99%, or 100%, amino acid sequence identity to the amino acid sequence: DIQMTQSPSSLSASVGDRVTITCRASQDVNTAVAWYQQKPGKAPKLLIYSASFLYSGVPSRFSGSRSGTDFTLTISSL QPEDFATYYCQQHYTTPPTFGQGTKVEIK (SEQ ID NO:245). Suitable linkers are described elsewhere herein and include, e.g., GGGGS (SEQ ID NO:130), consecutive repeats of which may appear from 2 to 10 times as a linker (e.g., 1, 2, 3, 4, 5, 6, 7, 8, 9, or 10 times).

[0429] In some cases, an anti-Her2 antibody comprises VL CDR1, VL CDR2, and VL CDR3 present in the light chain amino acid sequence provided above; and VH CDR1, CDR2, and CDR3 present in the heavy chain amino acid sequence provided above. In some cases, the VH and VL CDRs are as defined by Kabat (see, e.g., Table 1, above; and Kabat 1991). In some cases, the VH and VL CDRs are as defined by Chothia (see, e.g., Table 1, above; and Chothia 1987).

[0430] For example, an anti-Her2 antibody can comprise a VL CDR1 having the amino acid sequence RASQDVNTAVA (SEQ ID NO:247); a VL CDR2 having the amino acid sequence SASFLY (SEQ ID NO:248); a VL CDR3 having the amino acid sequence QQHYTTPP (SEQ ID NO:249); a VH CDR1 having the amino acid sequence GFNIKDY (SEQ ID NO:250); a VH CDR2 having the amino acid sequence IYPTNGYT (SEQ ID NO:251); and a VH CDR3 having the amino acid sequence SRWGGDGFYAMDY (SEQ ID NO:252).

[0431] In some cases, an anti-Her2 antibody is a scFv antibody. For example, an anti-Her2 scFv can comprise an amino acid sequence having at least 90%, at least 95%, at least 98%, at least 99%, or 100%, amino acid sequence identity to the following amino acid sequence: EVQLVESGGGLVQPGGSLRLSCAASGFNIKDTYIHWVRQAPGKGLE WVARIYPTNGYTRYADSVKGRFTISADTSKNTAYLQMNSLRAEDTAVYYCSRWGGDGFYAMDYWGQGTLVTVSSG GGGSGGGGSGGGGSDIQMTQSPSSLSASVGDRVTITCRASQDVNTAVAWYQQKPGKAPKLLIYSASFLYSGVPSRF SGSRSGTDFTLTISSLQPEDFATYYCQQHYTTPPTFGQGTKVEIK (SEQ ID NO:253).

[0432] As another example, in some cases, an anti-Her2 antibody comprises: a) a light chain variable region (VL) comprising an amino acid sequence having at least 90%, at least 95%, at least 98%, at least 99%, or 100%, amino acid sequence identity to the following amino acid sequence: DIQMTQSPSSLSASVGDRVTITCKASQDVSIGVAWYQ QKPGKAPKLLIYSASYRYTGVPSRFSGSGSGTDFTLTISSLQPEDFATYYCQQYYIYPYTFGQGTKVEIKRTVAAPSVF IFPPSDEQLKSGTASVVCLLNNFYPREAKVQWKVDNALQSGNSQESVTEQDSKDSTYSLSSTLTLSKADYEKHKVYA CEVTHQGLSSPVTKSFNRGEC (SEQ ID NO:254); and b) a heavy chain variable region (VH) comprising an amino acid sequence having at least 90%, at least 95%, at least 98%, at least 99%, or 100%, amino acid sequence identity to the following amino acid sequence: EVOLVESGGGLVQPGGSLRLSCAASGFTFTDYTMDWVRQAPGKGLEWVA DVNPNSGGSIYNQRFKGRFTLSVDRSKNTLYLQMNSLRAEDTAVYYCARNLGPSFYFDYWGQGTLVTVSSASTKGP SVFPLAPSSKSTSGGTAALGCLVKDYFPEPVTVSWNSGALTSGVHTFPAVLQSSGLYSLSSVVTVPSSSLGTQTYICN VNHKPSNTKVDKKVEPKSCDKTHTCPPCPAPELLGGPSVFLFPPKPKDTLMISRTPEVTCVVVDVSHEDPEVKFNWY VDGVEVHNAKTKPREEQYNSTYRVVSVLTVLHQDWLNGKEYKCKVSNKALPAPIEKTISKAKGQPREPQVYTLPPSR EEMTKNQVSLTCLVKGFYPSDIAVEWESNGQPENNYKTTPPVLDSDGSFFLYSKLTVDKSRWQQGNVFSCSVMHEA LHNHYTQKSLSLSPG (SEQ ID NO:255).

[0433] In some cases, an anti-Her2 antibody comprises a VL present in the light chain amino acid sequence provided above; and a VH present in the heavy chain amino acid sequence provided above. For example, an anti-Her2 antibody can comprise: a) a VL comprising an amino acid sequence having at least 90%, at least 95%, at least 98%, at least 99%, or 100%, amino acid sequence identity to the amino acid sequence: DIQMTQSPSSLSASVGDRV TITCKASQDVSIGVAWYQQKPGKAPKLLIYSASYRYTGVPSRFSGSGSGTDFTLTISSLQPEDFATYYCQQYYIYPYTF GQGTKVEIK (SEQ ID NO:256); and b) a VH comprising an amino acid sequence having at least 90%, at least 95%, at least 98%, at least 99%, or 100%, amino acid sequence identity to the amino acid sequence: EVOLVESGGGLVQ PGGSLRLSCAASGFTFTDYTMDWVRQAPGKGLEWVADVNPNSGGSIYNQRFKGRFTLSVDRSKNTLYLQMNSLRA EDTAVYYCARNLGPSFYFDYWGQGTLVTVSS (SEQ ID NO:257).

[0434] In some cases, an anti-Her2 antibody comprises VL CDR1, VL CDR2, and VL CDR3 present in the light chain amino acid sequence provided above; and VH CDR1, CDR2, and CDR3 present in the heavy chain amino acid sequence provided above. In some cases, the VH and VL CDRs are as defined by Kabat (see, e.g., Table 1, above; and Kabat 1991). In some cases, the VH and VL CDRs are as defined by Chothia (see, e.g., Table 1, above; and Chothia 1987).

[0435] For example, an anti-HER2 antibody can comprise a VL CDR1 having the amino acid sequence KASQDVSIGVA (SEQ ID NO:258); a VL CDR2 having the amino acid sequence SASYRY (SEQ ID NO:259); a VL CDR3 having the amino acid sequence QQYYIYPY (SEQ ID NO:260); a VH CDR1 having the amino acid sequence GFTFTDYTMD (SEQ ID NO:261); a VH CDR2 having the amino acid sequence ADVNPNSGGSIYNQRFKG (SEQ ID NO: 262); and a VH CDR3 having the amino acid sequence ARNLGPSFYFDY (SEQ ID NO:263).

[0436] In some cases, an anti-Her2 antibody is a scFv. For example, in some cases, an anti-Her2 scFv comprises an amino acid sequence having at least 90%, at least 95%, at least 98%, at least 99%, or 100%, amino acid sequence identity to the following amino acid sequence: EVOLVESGGGLVQPGGSLRLSCAASGFNIKDTYIHWVRQ APGKGLEWVARIYPTNGYTRYADSVKGRFTISADTSKNTAYLQMNSLRAEDTAVYYCSRWGGDGFYAMDYWGQGT LVTVSSGGGGSGGGGSGGGGSDIQMTQSPSSLSASVGDRVTITCRASQDVNTAVAWYQQKPGKAPKLLIYSASFLY SGVPSRFSGSRSGTDFTLTISSLQPEDFATYYCQQHYTTPPTFGQGTKVEIK (SEQ ID NO:253).

### (2) Anti-CD19

[0437] Anti-CD19 antibodies are known in the art; and the VH and VL, or the VH and VL CDRs, of any anti-CD19 antibody can be used in a T-Cell-MP or T-Cell-MP-epitope conjugate. See e.g., WO 2005/012493.

[0438] In some cases, an anti-CD19 antibody includes a VL CDR1 comprising the amino acid sequence KASQSVDYDGDSYLN (SEQ ID NO:264); a VL CDR2 comprising the amino acid sequence DASNLVS (SEQ ID NO: 265); and a VL CDR3 comprising the amino acid sequence QQSTEDPWT (SEQ ID NO:266). In some cases, an anti-CD19 antibody includes a VH CDR1 comprising the amino acid sequence SYWMN (SEQ ID NO:267); a VH CDR2 comprising the amino acid sequence QIWPGDGDTNYNGKFKG (SEQ ID NO:268); and a VH CDR3 comprising the amino acid sequence RETTTVGRYYYAMDY (SEQ ID NO:269). In some cases, an anti-CD19 antibody includes a VL CDR1 comprising the amino acid sequence KASQSVDYDGDSYLN (SEQ ID NO:264); a VL CDR2 comprising the amino acid sequence DASNLVS (SEQ ID NO:265); a VL CDR3 comprising the amino acid sequence QQSTEDPWT (SEQ ID NO:266); a VH CDR1 comprising the amino acid sequence SYWMN (SEQ ID NO: 267); a VH CDR2 comprising the amino acid sequence QIWPGDGDTNYNGKFKG (SEQ ID NO:268); and a VH CDR3 comprising the amino acid sequence RETTTVGRYYYAMDY (SEQ ID NO:269).

[0439] In some cases, an anti-CD19 antibody is a scFv. For example, in some cases, an anti-CD19 scFv comprises an amino acid sequence having at least 90%, at least 95%, at least 98%, at least 99%, or 100%, amino acid sequence identity to the following amino acid sequence: DIQLTQSPASLAVSLGQRATISCKASQSVDYDGDSY LNWYQQIPGQPPKLLIYDASNLVSGIPPRFSGSGSGTDFTLNIHPVEKVDAATYHCQQSTEDPWTFGGGTKLEIKGG GGSGGGGSGGGGSQVQLQQSGAELVRPGSSVKISCKASGYAFSSYWMNWVKQRPGQGLEWIGQIWPGDGDTNY NGKFKGKATLTADESSSTAYMQLSSLASEDSAVYFCARRETTTVGRYYYAMDYWGQGTTVTVS (SEQ ID NO:270).

### (3) Anti-mesothelin

[0440] Anti-mesothelin antibodies are known in the art; and the VH and VL, or the VH and VL CDRs, of any anti-mesothelin antibody can be used in a T-Cell-MP or T-Cell-MP-epitope conjugate. See, e.g., U.S. 2019/0000944; WO 2009/045957; WO 2014/031476; U.S. Pat. No. 8,460,660; US 2013/0066055; and WO 2009/068204. In some cases, a CTP is an anti-mesothelin scFv or an anti-mesothelin nanobody.

[0441] In some cases, an anti-mesothelin antibody comprises: a) a light chain comprising an amino acid sequence having at least 90%, at least 95%, at least 98%, at least 99%, or 100%, amino acid sequence identity to the following amino acid sequence: DIALTQPASVSGSPGQSITISCTGTSSDIGGYNSVSWYQQHPGKAPKLMIYGV NNRPSGVSNRFSGSKSGNTASLTISGLQAEDEADYYCSSYDIESATPVFGGGTKLTVLGQPKAAPSVTLFPPSSEEL QANKATLVCLISDFYPGAVTVAWKGDSSPVKAGVETTTPSKQSNNKYAASSYLSLTPEQWKSHRSYSCQVTHEGST VEKTVAPTESS (SEQ ID NO:271); and

[0442] b) a heavy chain comprising an amino acid sequence having at least 90%, at least 95%, at least 98%, at least 99%, or 100%, amino acid sequence identity to the following amino acid sequence: QVELVQSGAEVKKPGES LKISCKGSGYSFTSYWIGWVRQAPGKGLEWMGIIDPGDSRTRYSPSFQGQVTISADKSISTAYLQWSSLKASDTAMY YCARGQLYGGTYMDGWGQGTLVTVSSASTKGPSVFPLAPSSKSTSGGTAALGCLVKDYFPEPVTVSWNSGALTSG VHTFPAVLQSSGLYSLSSVVTVPSSSLGTQTYICNVNHKPSNTKVDKKVEPKSCDKTHTCPPCPAPELLGGPSVFLFP PKPKDTLMISRTPEVTCVVVDVSHEDPEVKFNWYVDGVEVHNAKTKPREEQYNSTYRVVSVLTVLHQDWLNGKEYK CKVSNKALPAPIEKTISKAKGQPREPQVYTLPPSRDELTKNQVSLTCLVKGFYPSDIAVEWESNGQPENNYKTTPPVL DSDGSFFLYSKLTVDKSRWQQGNVFSCSVMHEALHNHYTQKSLSLSPGK (SEQ ID NO:272).

[0443] In some cases, an anti-mesothelin antibody comprises a VL present in the light chain amino acid sequence provided above; and a VH present in the heavy chain amino acid sequence provided above. For example, an anti-mesothelin antibody can comprise: a) a VL comprising an amino acid sequence having at least 90%, at least 95%, at least 98%, at least 99%, or 100%, amino acid sequence identity to the amino acid sequence: DIALTQPASV SGSPGQSITISCTGTSSDIGGYNSVSWYQQHPGKAPKLMIYGVNNRPSGVSNRFSGSKSGNTASLTISGLQAEDEAD YYCSSYDIESATPVFGGGTK (SEQ ID NO:273); and b) a VH comprising an amino acid sequence having at least 90%, at least 95%, at least 98%, at least 99%, or 100%, amino acid sequence identity to the amino acid sequence:

(SEQ ID NO: 274)
QVELVQSGAEVKKPGESLKISCKGSGYSFTSYWIGWVRQA
PGKGLEWMGIIDPGDSRTRYSPSFQGQVTISADKSISTAY
LQWSSLKASDTAMYYCARGQLYGGTYMDGWGQGTLVTVSS.

[0444] In some cases, an anti-mesothelin antibody comprises VL CDR1, VL CDR2, and VL CDR3 present in the light chain amino acid sequence provided above; and VH CDR1, CDR2, and CDR3 present in the heavy chain amino acid sequence provided above. In some cases, the V_{H} and V_{L} CDRs are as defined by Kabat (see, e.g., Table 1, above; and Kabat 1991). In some cases, the V_{H} and V_{L} CDRs are as defined by Chothia (see, e.g., Table 1, above; and Chothia 1987).

[0445] For example, an anti-mesothelin antibody can comprise a VL CDR1 having the amino acid sequence TGTSSDIGGYNSVS (SEQ ID NO:275); a VL CDR2 having the amino acid sequence LMIYGVNNRPS (SEQ ID NO: 276); a VL CDR3 having the amino acid sequence SSYDIESATP (SEQ ID NO:277); a VH CDR1 having the amino acid sequence GYSFTSYWIG (SEQ ID NO:278); a VH CDR2 having the amino acid sequence WMGIIDPGDSRTRYSP (SEQ ID NO:279); and a VH CDR3 having the amino acid sequence GQLYGGTYMDG (SEQ ID NO:280).

[0446] An anti-mesothelin antibody can be a scFv. As one non-limiting example, an anti-mesothelin scFv can comprise the following amino acid sequence:

(SEQ ID NO: 281)
QVQLQQSGAEVKKPGASVKVSCKASGYTFTGYYMHWVRQAPGQGLEWMGR
INPNSGGTNYAQKFQGRVTMTRDTSISTAYMELSRLRSEDTAVYYCARGR
YYGMDVWGQGTMVTVSSGGGGSGGGGSGGGGSGGGGSEIVLTQSPATLSL
SPGERATISCRASQSVSSNFAWYQQRPGQAPRLLIYDASNRATGIPPRFS
GSGSGTDFTLTISSLEPEDFAAYYCHQRSNWLYTFGQGTKVDIK,

[0447] where VH CDR1, CDR2, and CDR3 are underlined; and VL CDR1, CDR2, and CDR3 are bolded and underlined.

[0448] As one non-limiting example, an anti-mesothelin scFv can comprise the following amino acid sequence:

(SEQ ID NO: 282)
QVQLVQSGAEVKKPGASVKVSCKASGYTFTGYYMHWVRQAPGQGLEWMGW
INPNSGGTNYAQKFQGRVTMTRDTSISTAYMELSRLRSDDTAVYYCARDL
RRTVVTPRAYYGMDVWGQGTTVTVSSGGGGGGGGSGGGGSGGGGSDIQLT
QSPSTLSASVGDRVTITCQASQDISNSLNWYQQKAGKAPKLLIYDASTLE
TGVPSRFSGSGSGTDFSFTISSLQPEDIATYYCQQHDNLPLTFGQGTKVE
IK,

[0449] where VH CDR1, CDR2, and CDR3 are underlined; and VL CDR1, CDR2, and CDR3 are bolded and underlined.

[0450] In some cases, an anti-mesothelin antibody comprises: a) VL CDR1, VL CDR2, and VL CDR3 present in a light chain variable region (VL) comprising the following amino acid sequence: EIVLTQSP GTLSLSPGERATLSCRASQSVSSSYLAWYQQKPGQAPRLLIYGASSRATGIPDRFSGSGSGTDFTLTISRLEPEDFAV YYCQQYGSSPIFTFGPGTKVDIK (SEQ ID NO:283); and b) VH CDR1, CDR2, and CDR3 present in a heavy chain variable region (VH) comprising the following amino acid sequence: QMQLVESGGGVVQPGRSLRLSCTASGFTFS NNGMHWVRQAPGKGLEWVAVIWFDGMNKFYVDSVKGRFTISRDNSKNTLYLEMNSLRAEDTAIYYCAREGDGSGIY YYYGMDVWGQGTTVTVSS (SEQ ID NO:284). In some cases, the V_{H} and V_{L} CDRs are as defined by Kabat (see, e.g., Table 1, above; and Kabat 1991). In some cases, the V_{H} and V_{L} CDRs are as defined by Chothia (see, e.g., Table 1, above; and Chothia 1987). See, e.g., BMS6A5.

[0451] In some cases, an anti-mesothelin antibody comprises: a) a VL region comprising an amino acid sequence having at least 90%, at least 95%, at least 98%, at least 99%, or 100%, amino acid sequence identity to the following amino acid sequence: EIVLTQSPGTLSLSPGERATLSCRASQSVSSSYLAWYQQKPGQAPRLLIYGASSRATGIPDRF SGSGSGTDFTLTISRLEPEDFAVYYCQQYGSSPIFTFGPGTKVDIK (SEQ ID NO:283); and b) a VH region comprising an amino acid sequence having at least 90%, at least 95%, at least 98%, at least 99%, or 100%, amino acid sequence identity to the following amino acid sequence: QMQLVESGGGVVQPGRSLRLSCTASGFTFSNNGMH WVRQAPGKGLEWVAVIWFDGMNKFYVDSVKGRFTISRDNSKNTLYLEMNSLRAEDTAIYYCAREGDGSGIYYYYGM DVWGQGTTVTVSS (SEQ ID NO:284).

[0452] In some cases, an anti-mesothelin antibody is a scFv comprising, in order from N-terminus to C-terminus: a) a VH region comprising an amino acid sequence having at least 90%, at least 95%, at least 98%, at least 99%, or 100%, amino acid sequence identity to the following amino acid sequence: QMQLVESGGGVVQPGRSLRLSCTASG FTFSNNGMHWVRQAPGKGLEWVAVIWFDGMNKFYVDSVKGRFTISRDNSKNTLYLEMNSLRAEDTAIYYCAREGDG SGIYYYYGMDVWGQGTTVTVSS (SEQ ID NO:284); b) a peptide linker; and c) a VL region comprising an amino acid sequence having at least 90%, at least 95%, at least 98%, at least 99%, or 100%, amino acid sequence identity to the following amino acid sequence: EIVLTQSPGTLSLSPGERATLSCRASQSVSSSYLAWYQQKPGQAPRLLI YGASSRATGIPDRFSGSGSGTDFTLTISRLEPEDFAVYYCQQYGSSPIFTFGPGTKVDIK (SEQ ID NO:283). In some cases, the peptide linker comprises the amino acid sequence GGGGS (SEQ ID NO:130), which may be repeated 2-10 times as a linker (e.g., 1, 2, 3, 4, 5, 6, 7, 8, 9, or 10 times). In some cases, the peptide linker comprises the amino acid sequence GGGGSGGGGSGGGGS (SEQ ID NO:285) and has a length of 15 amino acids.

[0453] In some cases, an anti-mesothelin antibody is a scFv comprising, in order from N-terminus to C-terminus: a) a VL region comprising an amino acid sequence having at least 90%, at least 95%, at least 98%, at least 99%, or 100%, amino acid sequence identity to the following amino acid sequence: EIVLTQSPGTLSLSPGERATLSCRASQS VSSSYLAWYQQKPGQAPRLLIYGASSRATGIPDRFSGSGSGTDFTLTISRLEPEDFAVYYCQQYGSSPIFTFGPGTKV DIK (SEQ ID NO:283); b) a peptide linker; and c) a VH region comprising an amino acid sequence having at least 90%, at least 95%, at least 98%, at least 99%, or 100%, amino acid sequence identity to the following amino acid sequence: QMQLVESGGGVVQPGRSLRLSCTASGFTFSNNGMHWVRQAPGKGLEWVAVIWFDGMNKFYVDSVK GRFTISRDNSKNTLYLEMNSLRAEDTAIYYCAREGDGSGIYYYYGMDVWGQGTTVTVSS (SEQ ID NO:284). In some cases, the peptide linker comprises the amino acid sequence GGGGS (SEQ ID NO:130), which may be repeated 2-10 times as a linker (e.g., 1, 2, 3, 4, 5, 6, 7, 8, 9, or 10 times). In some cases, the peptide linker comprises the amino acid sequence GGGGSGGGGSGGGGS (SEQ ID NO:285) and has a length of 15 amino acids.

[0454] In some cases, an anti-mesothelin antibody comprises: a) VL CDR1, VL CDR2, and VL CDR3 present in a light chain variable region (VL) comprising the following amino acid sequence: DIELTQSPAIMSASPGEKVTMTCSA SSSVSYMHWYQQKSGTSPKRWIYDTSKLASGVPGRFSGSGSGNSYSLTISSVEAEDDATYYCQQWSKHPLTFGSG TKVEIK (SEQ ID NO:286); and b) VH CDR1, CDR2, and CDR3 present in a heavy chain variable region (VH) comprising the following amino acid sequence: QVQLQQSGPELEKPGASVKISCKASGYSFTGYTMNWVKQSH GKSLEWIGLITPYNGASSYNQKFRGKATLTVDKSSSTAYMDLLSLTSEDSAVYFCARGGYDGRGFDYWGSGTPVTV SS (SEQ ID NO:287). In some cases, the V_{H} and V_{L} CDRs are as defined by Kabat (see, e.g., Table 1, above; and Kabat 1991). In some cases, the V_{H} and V_{L} CDRs are as defined by Chothia (see, e.g., Table 1, above; and Chothia 1987). See, e.g., Amatuximab.

[0455] In some cases, an anti-mesothelin antibody comprises: a) a VL region comprising an amino acid sequence having at least 90%, at least 95%, at least 98%, at least 99%, or 100%, amino acid sequence identity to the following amino acid sequence: DIELTQSPAIMSASPGEKVTMTCSASSSVSYMHWYQQKSGTSPKRWIYDTSKLASGVPGRFS GSGSGNSYSLTISSVEAEDDATYYCQQWSKHPLTFGSGTKVEIK (SEQ ID NO:286); and b) a VH region comprising an amino acid sequence having at least 90%, at least 95%, at least 98%, at least 99%, or 100%, amino acid sequence identity to the following amino acid sequence: QVQLQQSGPELEKPGASVKISCKASGYSFTGYTMNWVK QSHGKSLEWIGLITPYNGASSYNQKFRGKATLTVDKSSSTAYMDLLSLTSEDSAVYFCARGGYDGRGFDYWGSGTP VTVSS (SEQ ID NO:287).

[0456] In some cases, an anti-mesothelin antibody is a scFv comprising, in order from N-terminus to C-terminus: a) a VL region comprising an amino acid sequence having at least 90%, at least 95%, at least 98%, at least 99%, or 100%, amino acid sequence identity to the following amino acid sequence: DIELTQSPAIMSASPGEKVTMTCSASSS VSYMHWYQQKSGTSPKRWIYDTSKLASGVPGRFSGSGSGNSYSLTISSVEAEDDATYYCQQWSKHPLTFGSGTKV EIK (SEQ ID NO:286); b) a peptide linker; and c) a VH region comprising an amino acid sequence having at least 90%, at least 95%, at least 98%, at least 99%, or 100%, amino acid sequence identity to the following amino acid sequence: QVQLQQSGPELEKPGASVKISCKASGYSFTGYTMNWVKQSHGKSLEWIGLITPYNGASSYNQKFRGKA TLTVDKSSSTAYMDLLSLTSEDSAVYFCARGGYDGRGFDYWGSGTPVTVSS (SEQ ID NO:287). In some cases, the peptide linker comprises the amino acid sequence GGGGS (SEQ ID NO:130), which may be repeated 2-10 times as a linker (e.g., 1, 2, 3, 4, 5, 6, 7, 8, 9, or 10 times). In some cases, the peptide linker comprises the amino acid sequence GGGGSGGGGSGGGGS (SEQ ID NO:285) and has a length of 15 amino acids.

[0457] In some cases, an anti-mesothelin antibody is a scFv comprising, in order from N-terminus to C-terminus: a) a VH region comprising an amino acid sequence having at least 90%, at least 95%, at least 98%, at least 99%, or 100%, amino acid sequence identity to the following amino acid sequence: QVQLQQSGPELEKPGASVKISCKASG YSFTGYTMNWVKQSHGKSLEWIGLITPYNGASSYNQKFRGKATLTVDKSSSTAYMDLLSLTSEDSAVYFCARGGYD GRGFDYWGSGTPVTVSS (SEQ ID NO:287); b) a peptide linker; and c) a VL region comprising an amino acid sequence having at least 90%, at least 95%, at least 98%, at least 99%, or 100%, amino acid sequence identity to the following amino acid sequence: DIELTQSPAIMSASPGEKVTMTCSASSSVSYMHWYQQKSGTSPKRWIYDTSK LASGVPGRFSGSGSGNSYSLTISSVEAEDDATYYCQQWSKHPLTFGSGTKVEIK (SEQ ID NO:286). In some cases, the peptide linker comprises the amino acid sequence GGGGS (SEQ ID NO: 130), which may be repeated 2-10 times as a linker (e.g., 1, 2, 3, 4, 5, 6, 7, 8, 9, or 10 times). In some cases, the peptide linker comprises the amino acid sequence GGGGSGGGGSGGGGS (SEQ ID NO:285) and has a length of 15 amino acids.

[0458] In some cases, an anti-mesothelin antibody comprises: a) VL CDR1, VL CDR2, and VL CDR3 present in a light chain variable region (VL) comprising the following amino acid sequence: DIALTQPASVSGSPGQSITISCT GTSSDIGGYNSVSWYQQHPGKAPKLMIYGVNNRPSGVSNRFSGSKSGNTASLTISGLQAEDEADYYCSSYDIESATP VFGGGTKLTVLG (SEQ ID NO:288); and b) VH CDR1, CDR2, and CDR3 present in a heavy chain variable region (VH) comprising the following amino acid sequence: QVELVQSGAEVKKPGESLKISCKGSGYSFTSYWIGWVRQAP GKGLEWMGIIDPGDSRTRYSPSFQGQVTISADKSISTAYLQWSSLKASDTAMYYCARGQLYGGTYMDGWGQGTLVT VSS (SEQ ID NO:274). In some cases, the VH and VL CDRs are as defined by Kabat (see, e.g., Table 1, above; and Kabat 1991). In some cases, the VH and VL CDRs are as defined by Chothia (see, e.g., Table 1, above; and Chothia 1987).

[0459] In some cases, an anti-mesothelin antibody comprises: a) a VL region comprising an amino acid sequence having at least 90%, at least 95%, at least 98%, at least 99%, or 100%, amino acid sequence identity to the following amino acid sequence: DIALTQPASVSGSPGQSITISCTGTSSDIGGYNSVSWYQQHPGKAPKLMIYGVN NRPSGVSNRFSGSKSGNTASLTISGLQAEDEADYYCSSYDIESATPVFGGGTKLTVLG (SEQ ID NO:288); and b) a VH region comprising an amino acid sequence having at least 90%, at least 95%, at least 98%, at least 99%, or 100%, amino acid sequence identity to the following amino acid sequence: QVELVQSGAEVKKPGESLKISCKGSG YSFTSYWIGWVRQAPGKGLEWMGIIDPGDSRTRYSPSFQGQVTISADKSISTAYLQWSSLKASDTAMYYCARGQLY GGTYMDGWGQGTLVTVSS (SEQ ID NO:274).

[0460] In some cases, an anti-mesothelin antibody is a scFv comprising, in order from N-terminus to C-terminus: a) a VL region comprising an amino acid sequence having at least 90%, at least 95%, at least 98%, at least 99%, or 100%, amino acid sequence identity to the following amino acid sequence: DIALTQPASVSGSPGQSITISCTGTSSDI GGYNSVSWYQQHPGKAPKLMIYGVNNRPSGVSNRFSGSKSGNTASLTISGLQAEDEADYYCSSYDIESATPVFGGG TKLTVLG (SEQ ID NO:288); b) a peptide linker; and c) a VH region comprising an amino acid sequence having at least 90%, at least 95%, at least 98%, at least 99%, or 100%, amino acid sequence identity to the following amino acid sequence: QVELVQSGAEVKKPGESLKISCKGSGYSFTSYWIGWVRQAPGKGLEWMGIIDPGDSRTRYSPSFQ GQVTISADKSISTAYLQWSSLKASDTAMYYCARGQLYGGTYMDGWGQGTLVTVSS (SEQ ID NO:274). In some cases, the peptide linker comprises the amino acid sequence GGGGS (SEQ ID NO: 130), which may be repeated 2-10 times as a linker (e.g., 1, 2, 3, 4, 5, 6, 7, 8, 9, or 10 times). In some cases, the peptide linker comprises the amino acid sequence GGGGSGGGGSGGGGS (SEQ ID NO:285) and has a length of 15 amino acids.

[0461] In some cases, an anti-mesothelin antibody is a scFv comprising, in order from N-terminus to C-terminus: a) a VH region comprising an amino acid sequence having at least 90%, at least 95%, at least 98%, at least 99%, or 100%, amino acid sequence identity to the following amino acid sequence: QVELVQSGAEVKKPGESLKISCKGSGY SFTSYWIGWVRQAPGKGLEWMGIIDPGDSRTRYSPSFQGQVTISADKSISTAYLQWSSLKASDTAMYYCARGQLYG GTYMDGWGQGTLVTVSS (SEQ ID NO:274); b) a peptide linker; and c) a VL region comprising an amino acid sequence having at least 90%, at least 95%, at least 98%, at least 99%, or 100%, amino acid sequence identity to the following amino acid sequence: DIALTQPASVSGSPGQSITISCTGTSSDIGGYNSVSWYQQHPGKAPKLMIYGV NNRPSGVSNRFSGSK SGNTASLTISGLQAEDEADYYCSSYDIESATPVFGGGTKLTVLG (SEQ ID NO:288). In some cases, the peptide linker comprises the amino acid sequence GGGGS (SEQ ID NO:130), which may be repeated 2-10 times as a linker (e.g., 1, 2, 3, 4, 5, 6, 7, 8, 9, or 10 times). In some cases, the peptide linker comprises the amino acid sequence GGGGSGGGGSGGGGS (SEQ ID NO:285) and has a length of 15 amino acids.

[0462] In some cases, an anti-mesothelin antibody comprises: a) VL CDR1, VL CDR2, and VL CDR3 present in a light chain variable region (VL) comprising the following amino acid sequence: DIQMTQSPSSLSASVGDRVTIT CSASSSVSYMHWYQQKSGKAPKLLIYDTSKLASGVPSRFSGSGSGTDFTLTISSLQPEDFATYYCQQWSKHPLTFG QGTKLEIK (SEQ ID NO:289); and b) VH CDR1, CDR2, and CDR3 present in a heavy chain variable region (VH) comprising the following amino acid sequence: QVQLVQSGAEVKKPGASVKVSCKASGYSFTGYTMNWVRQAPGQ GLEWMGLITPYNGASSYNQKFRGKATMTVDTSTSTVYMELSSLRSEDTAVYYCARGGYDGRGFDYWGQGTLVTVS S (SEQ ID NO:290). In some cases, the VH and VL CDRs are as defined by Kabat (see, e.g., Table 1, above; and Kabat 1991). In some cases, the VH and VL CDRs are as defined by Chothia (see, e.g., Table 1, above; and Chothia 1987). See, e.g., RG7787.

[0463] In some cases, an anti-mesothelin antibody comprises: a) a VL region comprising an amino acid sequence having at least 90%, at least 95%, at least 98%, at least 99%, or 100%, amino acid sequence identity to the following amino acid sequence: DIQMTQSPSSLSASVGDRVTITCSASSSVSYMHWYQQKSGKAPKLLIY DTSKLASGVPSRFSGSGSGTDFTLTISSLQPEDFATYYCQQWSKHPLTFGQGTKLEIK (SEQ ID NO:289); and b) a VH region comprising an amino acid sequence having at least 90%, at least 95%, at least 98%, at least 99%, or 100%, amino acid sequence identity to the following amino acid sequence: QVQLVQSGAEVKKPGASVKVSCKASG YSFTGYTMNWVRQAPGQGLEWMGLITPYNGASSYNQKFRGKATMTVDTSTSTVYMELSSLRSEDTAVYYCARGGY DGRGFDYWGQGTLVTVSS (SEQ ID NO:290).

[0464] In some cases, an anti-mesothelin antibody is a scFv comprising, in order from N-terminus to C-terminus: a) a VL region comprising an amino acid sequence having at least 90%, at least 95%, at least 98%, at least 99%, or 100%, amino acid sequence identity to the following amino acid sequence: DIQMTQSPSSLSASVGDRVTITCSASSS VSYMHWYQQKSGKAPKLLIYDTSKLASGVPSRFSGSGSGTDFTLTISSLQPEDFATYYCQQWSKHPLTFGQGTKLEI K (SEQ ID NO:289); b) a peptide linker; and c) a VH region comprising an amino acid sequence having at least 90%, at least 95%, at least 98%, at least 99%, or 100%, amino acid sequence identity to the following amino acid sequence: QVQLVQSGAEVKKPGASVKVSCKASGYSFTGYTMNWVRQAPGQGLEWMGLITPYNGASSYNQKFRGK ATMTVDTSTSTVYMELSSLRSEDTAVYYCARGGYDGRGFDYWGQGTLVTVSS (SEQ ID NO:290). In some cases, the peptide linker comprises the amino acid sequence (GGGGS (SEQ ID NO: 130), which may be repeated 2-10 times as a linker (e.g., 1, 2, 3, 4, 5, 6, 7, 8, 9, or 10 times). In some cases, the peptide linker comprises the amino acid sequence GGGGSGGGGSGGGGS (SEQ ID NO:285) and has a length of 15 amino acids.

[0465] In some cases, an anti-mesothelin antibody is a scFv comprising, in order from N-terminus to C-terminus: a) a VH region comprising an amino acid sequence having at least 90%, at least 95%, at least 98%, at least 99%, or 100%, amino acid sequence identity to the following amino acid sequence: QVQLVQSGAEVKKPGASVKVSCKASG YSFTGYTMNWVRQAPGQGLEWMGLITPYNGASSYNQKFRGKATMTVDTSTSTVYMELSSLRSEDTAVYYCARGGY DGRGFDYWGQGTLVTVSS (SEQ ID NO:290); b) a peptide linker; and c) a VL region comprising an amino acid sequence having at least 90%, at least 95%, at least 98%, at least 99%, or 100%, amino acid sequence identity to the following amino acid sequence: DIQMTQSPSSLSASVGDRVTITCSASSSVSYMHWYQQKSGKAPKLLIYDTSKLA SGVPSRFSGSGSGTDFTLTISSLQPEDFATYYCQQWSKHPLTFGQGTKLEIK (SEQ ID NO:289/). In some cases, the peptide linker comprises the amino acid sequence (GGGGS) n (SEQ ID NO:130), GGGGS (SEQ ID NO:130), which may be repeated 2-10 times as a linker sequence (e.g., 1, 2, 3, 4, 5, 6, 7, 8, 9, or 10 times). In some cases, the peptide linker comprises the amino acid sequence GGGGSGGGGSGGGGS (SEQ ID NO:285) and has a length of 15 amino acids.

[0466] In some cases, an anti-mesothelin scFv comprises the following amino acid sequence:

(SEQ ID NO: 291)
QMQLVESGGGVVQPGRSLRLSCTASGFTFSNNGMHWVRQAPGKGL
EWVAVIWFDGMNKFYVDSVKGRFTISRDNSKNTLYLEMNSLRAED
TAIYYCAREGDGSGIYYYYGMDVWGQGTTVTVSSGGGGSGGGGSG
GGGSEIVLTQSPGTLSLSPGERATLSCRASQSVSSSYLAWYQQKP
GQAPRLLIYGASSRATGIPDRFSGSGSGTDFTLTISRLEPEDFAV
YYCQQYGSSPIFTFGPGTKVDIK,

where the VH sequence is italicized, the (GGGGS)3 linker is bolded and underlined, and the VL sequence is underlined.

[0467] In some cases, an anti-mesothelin scFv comprises the following amino acid sequence

(SEQ ID NO: 292
EIVLTQSPGTLSLSPGERATLSCRASQSVSSSYLAWYQQKPGQAP
RLLIYGASSRATGIPDRESGSGSGTDFTLTISRLEPEDFAVYYCQ
QYGSSPIFTFGPGTKVDIKGGGGSGGGGSGGGGSQMQLVESGGGV
VQPGRSLRLSCTASGFTFSNNGMHWVRQAPGKGLEWVAVIWFDGM
NKFYVDSVKGRFTISRDNSKNTLYLEMNSLRAEDTAIYYCAREGD
GSGIYYYYGMDVWGQGTTVTVSS,

where the VL sequence is underlined, the (GGGGS)3 linker is bolded and underlined, and the VL sequence is italicized.

[0468] In some cases, an anti-mesothelin scFv comprises the following amino acid sequence:

(SEQ ID NO: 293)
QVQLQQSGPELEKPGASVKISCKASGYSFTGYTMNWVKQSHGKSL
EWIGLITPYNGASSYNQKFRGKATLTVDKSSSTAYMDLLSLTSED
SAVYFCARGGYDGRGFDYWGSGTPVTVSSGGGGSGGGGSGGGGSD
IELTQSPAIMSASPGEKVTMTCSASSSVSYMHWYQQKSGTSPKRW
IYDTSKLASGVPGRFSGSGSGNSYSLTISSVEAEDDATYYCQQWS
KHPLTFGSGTKVEIK,

where the VH sequence is italicized, the (GGGGS)3 linker is bolded and underlined, and the VL sequence is underlined.

[0469] In some cases, an anti-mesothelin scFv comprises the following amino acid sequence:

(SEQ ID NO: 294)
DIELTQSPAIMSASPGEKVTMTCSASSSVSYMHWYQQKSGTSPKR
WIYDTSKLASGVPGRFSGSGSGNSYSLTISSVEAEDDATYYCQQW
SKHPLTFGSGTKVEIKGGGGSGGGGSGGGGSQVQLQQSGPELEKP
GASVKISCKASGYSFTGYTMNWVKQSHGKSLEWIGLITPYNGASS
YNQKFRGKATLTVDKSSSTAYMDLLSLTSEDSAVYFCARGGYDGR
GFDYWGSGTPVTVSS,

where the VL sequence is underlined, the (GGGGS)3 linker is bolded and underlined, and the VL sequence is italicized.

[0470] In some cases, an anti-mesothelin scFv comprises the following amino acid sequence:

(SEQ ID NO: 295)
QVELVQSGAEVKKPGESLKISCKGSGYSFTSYWIGWVRQAPGKGL
EWMGIIDPGDSRTRYSPSFQGQVTISADKSISTAYLQWSSLKASD
TAMYYCARGQLYGGTYMDGWGQGTLVTVSSGGGGSGGGGSGGGGS
DIALTQPASVSGSPGQSITISCTGTSSDIGGYNSVSWYQQHPGKA
PKLMIYGVNNRPSGVSNRFSGSKSGNTASLTISGLQAEDEADYYC
SSYDIESATPVFGGGTKLTVLG,

where the VH sequence is italicized, the (GGGGS)3 linker is bolded and underlined, and the VL sequence is underlined.

[0471] In some cases, an anti-mesothelin scFv comprises the following amino acid sequence:

(SEQ ID NO: 296)
DIALTQPASVSGSPGQSITISCTGTSSDIGGYNSVSWYQQHPGKA
PKLMIYGVNNRPSGVSNRFSGSKSGNTASLTISGLQAEDEADYYC
SSYDIESATPVFGGGTKLTVLGGGGGSGGGGSGGGGSQVELVQSG
AEVKKPGESLKISCKGSGYSFTSYWIGWVRQAPGKGLEWMGIIDP
GDSRTRYSPSFQGQVTISADKSISTAYLQWSSLKASDTAMYYCAR
GQLYGGTYMDGWGQGTLVTVSS,

where the VL sequence is underlined, the (GGGGS)3 linker is bolded and underlined, and the VL sequence is italicized.

[0472] In some cases, an anti-mesothelin scFv comprises the following amino acid sequence:

(SEQ ID NO: 297)
QVQLVQSGAEVKKPGASVKVSCKASGYSFTGYTMNWVRQAPGQGL
EWMGLITPYNGASSYNQKFRGKATMTVDTSTSTVYMELSSLRSED
TAVYYCARGGYDGRGFDYWGQGTLVTVSSGGGGSGGGGSGGGGSD
IQMTQSPSSLSASVGDRVTITCSASSSVSYMHWYQQKSGKAPKLL
IYDTSKLASGVPSRFSGSGSGTDFTLTISSLQPEDFATYYCQQWS
KHPLTFGQGTKLEIK,

where the VH sequence is italicized, the (GGGGS)3 linker is bolded and underlined, and the VL sequence is underlined.

[0473] In some cases, an anti-mesothelin scFv comprises the following amino acid sequence:

(SEQ ID NO: 298)
DIQMTQSPSSLSASVGDRVTITCSASSSVSYMHWYQQKSGKAPKL
LIYDTSKLASGVPSRFSGSGSGTDFTLTISSLQPEDFATYYCQQW
SKHPLTFGQGTKLEIKGGGGSGGGGSGGGGSQVQLVQSGAEVKKP
GASVKVSCKASGYSFTGYTMNWVRQAPGQGLEWMGLITPYNGASS
YNQKFRGKATMTVDTSTSTVYMELSSLRSEDTAVYYCARGGYDGR
GFDYWGQGTLVTVSS,

where the VL sequence is underlined, the (GGGGS)3 (SEQ ID NO:285) linker is bolded and underlined, and the VL sequence is italicized.

### (4) Anti-PSMA

[0474] Prostate-specific membrane antigen (PSMA) (also known as folate hydrolase 1 (FOLH1); membrane glutamate carboxypeptidase, and N-Acetylated-Alpha-Linked Acidic Dipeptidase 1) that is up-regulated in cancerous cells in the prostate and is used as a diagnostic and prognostic indicator of prostate cancer.

[0475] Anti-PSMA antibodies are known in the art; and the VH and VL, or the VH and VL CDRs, of any anti-PSMA antibody can be used in a T-Cell-MP or T-Cell-MP-epitope conjugate. See, e.g., U.S. Pat. No. 10,179,819 and U.S. Patent Publication No. 2021/0277141.

### (5) Anti-CD22

[0476] CD22 (also known as B-Lymphocyte Cell Adhesion Molecule, Sialic Acid-Binding Ig-Like Lectin 2, or SIGLEC2) is a sialic acid-binding adhesion molecule largely restricted to the B cell lineage and expressed on most B-lineage malignancies.

[0477] Anti-CD22 antibodies are known in the art; and the VH and VL, or the VH and VL CDRs, of any anti-CD22 antibody can be used in a T-Cell-MP or T-Cell-MP-epitope conjugate. See, e.g., Xiao et al. (2009) Mabs 1:297 (describing the fully human anti-CD22 m971 scFv); and U.S. Patent Publication No. 2020/0147134. Examples of anti-CD22 antibodies include epratuzumab and inotuzumab. See, e.g., Lenoard et al. (2007) Oncogene 26:3704 and U.S. Pat. No. 5,789,554 (describing epratuzumab); and DiJoseph et al. (2007) Leukemia 21:2240 (describing inotuzumab).

[0478] For example, an anti-CD22 antibody can comprise: i) a heavy chain variable region (VH) CDR1 having the amino acid sequence: GDSVSSNSAA (SEQ ID NO:299); ii) a VH CDR2 having the amino acid sequence: TYYRSKWYN (SEQ ID NO:300); iii) a VH CDR3 having the amino acid sequence: AREVTGDLEDAFDI (SEQ ID NO: 301); iv) a light chain variable region (VL) CDR1 having the amino acid sequence: QTIWSY (SEQ ID NO:302); v) a VL CDR2 having the amino acid sequence: AAS (Ala-Ala-Ser); and vi) a VL CDR3 having the amino acid sequence: QQSYSIPQT (SEQ ID NO:303).

### (6) Anti-TROP-2

[0479] Trophoblast cell surface antigen 2 (Trop-2) (also known as epithelial glycoprotein-1, gastrointestinal tumor-associated antigen GA733-1, membrane component chromosome 1 surface marker-1, and tumor-associated calcium signal transducer-2) is a transmembrane glycoprotein that is upregulated in numerous cancer types, and is the protein product of the TACSTD2 gene.

[0480] In some cases, a CTP is an anti-TROP-2 scFv or an anti-TROP-2 nanobody.

[0481] Anti-TROP-2 antibodies are known in the art; and the VH and VL, or the VH and VL CDRs, of any anti-TROP-2 antibody can be used in a T-Cell-MP or T-Cell-MP-epitope conjugate. See, e.g., U.S. Pat. No. 7,238,785). In some cases, an anti-TROP-2 antibody comprises: i) light chain CDR sequences CDR1 (KASQDVSIAVA; SEQ ID NO: 304); CDR2 (SASYRYT; SEQ ID NO:305); and CDR3 (QQHYITPLT; SEQ ID NO:306); and ii) heavy chain CDR sequences CDR1 (NYGMN; SEQ ID NO:307); CDR2 (WINTYTGEPTYTDDFKG; SEQ ID NO:308); and CDR3 (GGFGSSYWYFDV; SEQ ID NO:309).

[0482] In some cases, an anti-TROP-2 antibody comprises: i) heavy chain CDR sequences CDR1 (TAGMQ; SEQ ID NO: 310); CDR2 (WINTHSGVPKYAEDFKG; (SEQ ID NO:311); and CDR3 (SGFGSSYWYFDV; SEQ ID NO:312); and ii) light chain CDR sequences CDR1 (KASQDVSTAVA; SEQ ID NO:313); CDR2 (SASYRYT; SEQ ID NO:305); and CDR3 (QQHYITPLT; SEQ ID NO:306).

[0483] In some cases, an anti-TROP2 antibody comprises: a) VL CDR1, VL CDR2, and VL CDR3 present in a light chain variable region (VL) comprising the following amino acid sequence: DIQLTQSPSSLSASVGDRVSITCKAS QDVSIAVAWYQQKPGKAPKLLIYSASYRYTGVPDRFSGSGSGTDFTLTISSLQPEDFAVYYCQQHYITPLTFGAGTKV EIK (SEQ ID NO:314); and b) VH CDR1, CDR2, and CDR3 present in a heavy chain variable region (VH) comprising the following amino acid sequence: QVQLQQSGSELKKPGASVKVSCKASGYTFTNYGMNWVKQAPGQGLKWMGWI NTYTGEPTYTDDFKGRFAFSLDTSVSTAYLQISSLKADDTAVYFCARGGFGSSYWYFDVWGQGSLVTVSS (SEQ ID NO: 315). In some cases, the VH and VL CDRs are as defined by Kabat (see, e.g., Table 1, above; and Kabat 1991). In some cases, the VH and VL CDRs are as defined by Chothia (see, e.g., Table 1, above; and Chothia 1987).

[0484] In some cases, an anti-TROP-2 antibody comprises: a) a VL region comprising an amino acid sequence having at least 90%, at least 95%, at least 98%, at least 99%, or 100%, amino acid sequence identity to the following amino acid sequence: DIQLTQSPSSLSASVGDRVSITCKASQDVSIAVAWYQQKPGKAPKLLIYSASYRYTGVPD RFSGSGSGTDFTLTISSLQPEDFAVYYCQQHYITPLTFGAGTKVEIK (SEQ ID NO:314); and b) a VH region comprising an amino acid sequence having at least 90%, at least 95%, at least 98%, at least 99%, or 100%, amino acid sequence identity to the following amino acid sequence: QVQLQQSGSELKKPGASVKVSCKASGYTFTNYG MNWVKQAPGQGLKWMGW INTYTGEPTYTDDFKGRFAFSLDTSVSTAYLQISSLKADDTAVYFCARGGFGS SYWYFDVWGQGSLVTVSS (SEQ ID NO:315).

[0485] In some cases, an anti-TROP-2 antibody is a scFv comprising, in order from N-terminus to C-terminus: a) a VL region comprising an amino acid sequence having at least 90%, at least 95%, at least 98%, at least 99%, or 100%, amino acid sequence identity to the following amino acid sequence: DIQLTQSPSSLSASVGDRVSITCKASQD VSIAVAWYQQKPGKAPKLLIYSASYRYTGVPDRFSGSGSGTDFTLTISSLQPEDFAVYYCQQHYITPLTFGAGTKVEIK (SEQ ID NO:314); b) a peptide linker; and c) a VH region comprising an amino acid sequence having at least 90%, at least 95%, at least 98%, at least 99%, or 100%, amino acid sequence identity to the following amino acid sequence: QVQLQQSGSELKKPGASVKVSCKASGYTFTNYGMNWVKQAPGQGLKWMGWINTYTGEPTYTDDFKG RFAFSLDTSVSTAYLQISSLKADDTAVYFCARGGFGSSYWYFDVWGQGSLVTVSS (SEQ ID NO:315). In some cases, the peptide linker comprises the amino acid sequence GGGGS (SEQ ID NO:130), which may be repeated 2-10 times as the linker (e.g., 1, 2, 3, 4, 5, 6, 7, 8, 9, or 10 times). In some cases, the peptide linker comprises the amino acid sequence GGGGSGGGGSGGGGS (SEQ ID NO:285) and has a length of 15 amino acids.

[0486] In some cases, an anti-TROP-2 antibody is a scFv comprising, in order from N-terminus to C-terminus: a) a VH region comprising an amino acid sequence having at least 90%, at least 95%, at least 98%, at least 99%, or 100%, amino acid sequence identity to the following amino acid sequence: QVQLQQSGSELKKPGASVKVSCKASG YTFTNYGMNWVKQAPGQGLKWMGWINTYTGEPTYTDDFKGRFAFSLDTSVSTAYLQISSLKADDTAVYFCARGGFG SSYWYFDVWGQGSLVTVSS (SEQ ID NO:315); b) a peptide linker; and c) a VL region comprising an amino acid sequence having at least 90%, at least 95%, at least 98%, at least 99%, or 100%, amino acid sequence identity to the following amino acid sequence: DIQLTQSPSSLSASVGDRVSITCKASQDVSIAVAWYQQKPGKAPKLLIYS ASYRYTGVPDRFSGSGSGTDFTLTISSLQPEDFAVYYCQQHYITPLTFGAGTKVEIK (SEQ ID NO:314). In some cases, the peptide linker comprises the amino acid sequence GGGGS (SEQ ID NO:130), which may be repeated 2-10 times as a linker sequence (e.g., 1, 2, 3, 4, 5, 6, 7, 8, 9, or 10 times). In some cases, the peptide linker comprises the amino acid sequence GGGGSGGGGSGGGGS (SEQ ID NO:285) and has a length of 15 amino acids.

[0487] In some cases, an anti-TROP2 antibody comprises: a) VL CDR1, VL CDR2, and VL CDR3 present in a light chain variable region (VL) comprising the following amino acid sequence: DIQMTQSP SSLSASVGDRVTITCK ASQDVSTAVAWYQQKPGKAPKLLIYSASYRYTGVPSRFSGSGSGTDFTLTISSLQPEDFAVYYCQQHYITPLTFGQG TKLEIK (SEQ ID NO:316); and b) VH CDR1, CDR2, and CDR3 present in a heavy chain variable region (VH) comprising the following amino acid sequence: QVQLVQSGAEVKKPGASVKVSCKASGYTFTTAGMQWVRQAPGQ GLEWMGWINTHSGVPKYAEDFKGRVTISADTSTSTAYLQLSSLKSEDTAVYYCARSGFGSSYWYFDVWGQGTLVTV SS (SEQ ID NO:317). In some cases, the V_{H} and V_{L} CDRs are as defined by Kabat (see, e.g., Table 1, above; and Kabat 1991). In some cases, the V_{H} and V_{L} CDRs are as defined by Chothia (see, e.g., Table 1, above; and Chothia 1987).

[0488] In some cases, an anti-TROP-2 antibody comprises: a) a VL region comprising an amino acid sequence having at least 90%, at least 95%, at least 98%, at least 99%, or 100%, amino acid sequence identity to the following amino acid sequence: DIQMTQSPSSLSASVGDRVTITCKASQDVSTAVAWYQQKPGKAPKLLIYSASYRYTGVPSRF SGSGSGTDFTLTISSLQPEDFAVYYCQQHYITPLTFGQGTKLEIK (SEQ ID NO:316); and b) a VH region comprising an amino acid sequence having at least 90%, at least 95%, at least 98%, at least 99%, or 100%, amino acid sequence identity to the following amino acid sequence: QVQLVQSGAEVKKPGASVKVSCKASGYTFTTAGMQWVR QAPGQGLEWMGWINTHSGVPKYAEDFKGRVTISADTSTSTAYLQLSSLKSEDTAVYYCARSGFGSSYWYFDVWGQ GTLVTVSS (SEQ ID NO:317).

[0489] In some cases, an anti-TROP-2 antibody is a scFv comprising, in order from N-terminus to C-terminus: a) a VL region comprising an amino acid sequence having at least 90%, at least 95%, at least 98%, at least 99%, or 100%, amino acid sequence identity to the following amino acid sequence: DIQMTQSPSSLSASVGDRVTITCKASQ DVSTAVAWYQQKPGKAPKLLIYSASYRYTGVPSRFSGSGSGTDFTLTISSLQPEDFAVYYCQQHYITPLTFGQGTKLE IK (SEQ ID NO:316); b) a peptide linker; and c) a VH region comprising an amino acid sequence having at least 90%, at least 95%, at least 98%, at least 99%, or 100%, amino acid sequence identity to the following amino acid sequence: QVQLVQSGA EVKKPGASVKVSCKASGYTFTTAGMQWVRQAPGQGLEWMGWINTHSGVPKYAEDFKGRVTISADTSTSTAYLQLS SLKSEDTAVYYCARSGFGSSYWYFDVWGQGTLVTVSS (SEQ ID NO:317). In some cases, the peptide linker comprises the amino acid sequence GGGGS (SEQ ID NO: 130), which may be repeated 2-10 times as a linker sequence (e.g., 1, 2, 3, 4, 5, 6, 7, 8, 9, or 10 times). In some cases, the peptide linker comprises the amino acid sequence GGGGSGGGGSGGGGS (SEQ ID NO:285) and has a length of 15 amino acids.

[0490] In some cases, an anti-TROP-2 antibody is a scFv comprising, in order from N-terminus to C-terminus: a) a VH region comprising an amino acid sequence having at least 90%, at least 95%, at least 98%, at least 99%, or 100%, amino acid sequence identity to the following amino acid sequence: QVQLVQSGAEVKKPGASVKVSCKASG YTFTTAGMQWVRQAPGQGLEWMGWINTHSGVPKYAEDFKGRVTISADTSTSTAYLQLSSLKSEDTAVYYCARSGFG SSYWYFDVWGQGTLVTVSS (SEQ ID NO:317); b) a peptide linker; and c) a VL region comprising an amino acid sequence having at least 90%, at least 95%, at least 98%, at least 99%, or 100%, amino acid sequence identity to the following amino acid sequence: DIQMTQSPSSLSASVGDRVTITCKASQDVSTAVAWYQQKPGKAPKLLIYSASYR YTGVPSRFSGSGSGTDFTLTISSLQPEDFAVYYCQQHYITPLTFGQGTKLEIK (SEQ ID NO:316). In some cases, the peptide linker comprises the amino acid sequence GGGGS (SEQ ID NO: 130), which may be repeated 2-10 times as a linker sequence (e.g., 1, 2, 3, 4, 5, 6, 7, 8, 9, or 10 times). In some cases, the peptide linker comprises the amino acid sequence GGGGSGGGGSGGGGS (SEQ ID NO:285) and has a length of 15 amino acids.

### (7) Anti-BCMA

[0491] Anti-BCMA (B-cell maturation antigen) antibodies are known in the art; and the VH and VL, or the VH and VL CDRs, of any anti-BCMA antibody can be used in a T-Cell-MP or T-Cell-MP-epitope conjugate. See, e.g., WO 2014/089335; US 2019/0153061; and WO 2017/093942.

[0492] In some cases, an anti-BCMA antibody comprises: a) a light chain comprising an amino acid sequence having at least 90%, at least 95%, at least 98%, at least 99%, or 100%, amino acid sequence identity to the following amino acid sequence: QSVLTQPPSASGTPGQRVTISCSGSSSNIGSNTVNWYQQLPGTAPKLLIFNYHQRPSGVPDR FSGSKSGSSASLAISGLQSEDEADYYCAAWDDSLNGWVFGGGTKLTVLGQPKAAPSVTLFPPSSEELQANKATLVCL ISDFYPGAVTVAWKADSSPVKAGVETTTPDSKQSNNKYAASSYLSLTPEQWKSHRSYSCQVTHEGSTVEKTVAPTE CS (SEQ ID NO:318); and b) a heavy chain comprising an amino acid sequence having at least 90%, at least 95%, at least 98%, at least 99%, or 100%, amino acid sequence identity to the following amino acid sequence: EVOLVES GGGLVKPGGSLRLSCAASGFTFGDYALSWFRQAPGKGLEWVGVSRSKAYGGTTDYAASVKGRFTISRDDSKSTAYL QMNSLKTEDTAVYYCASSGYSSGWTPFDYWGQGTLVTVSSASTKGPSVFPLAPSSKSTSGGTAALGCLVKDYFPEP VTVSWNSGALTSGVHTFPAVLQSSGLYSLSSVVTVPSSSLGTQTYICNVNHKPSNTKVDKKVEPKSCDKTHTCPPCP APELLGGPSVFLFPPKPKDTLMISRTPEVTCVVVDVSHEDPEVKFNWYVDGVEVHNAKTKPREEQYNSTYRVVSVLT VLHQDWLNGKEYKCKVSNKALPAPIEKTISKAKGQPREPQVYTLPPSREEMTKNQVSLTCLVKGFYPSDIAVEWESN GQPENNYKTTPPVLDSDGSFFLYSKLTVDKSRWQQGNVFSCSVMHEALHNHYTQKSLSLSPGK (SEQ ID NO:319).

[0493] In some cases, an anti-BCMA antibody comprises a VL present in the light chain amino acid sequence provided above; and a VH present in the heavy chain amino acid sequence provided above. For example, an anti-BCMA antibody can comprise: a) a VL comprising an amino acid sequence having at least 90%, at least 95%, at least 98%, at least 99%, or 100%, amino acid sequence identity to the amino acid sequence: QSVLTQPPSASGT PGQRVTISCSGSSSNIGSNTVNWYQQLPGTAPKLLIFNYHQRPSGVPDRFSGSKSGSSASLAISGLQSEDEADYYCA AWDDSLNGWVFGGGTKLTVLG (SEQ ID NO:320); and b) a VH comprising an amino acid sequence having at least 90%, at least 95%, at least 98%, at least 99%, or 100%, amino acid sequence identity to the amino acid sequence: EVOLVESGGGLVKPGGSLRLSCAASGFTFGDYALSWFRQAPGKGLEWVGVSRSKAYGGTTDYAASVKGRFT ISRDDSKSTAYLQMNSLKTEDTAVYYCASSGYSSGWTPFDYWGQGTLVTVSSASTKGPSV (SEQ ID NO:321).

[0494] In some cases, an anti-BCMA antibody comprises VL CDR1, VL CDR2, and VL CDR3 present in the light chain amino acid sequence provided above; and VH CDR1, CDR2, and CDR3 present in the heavy chain amino acid sequence provided above. In some cases, the V_{H} and V_{L} CDRs are as defined by Kabat (see, e.g., Table 1, above; and Kabat 1991). In some cases, the V_{H} and V_{L} CDRs are as defined by Chothia (see, e.g., Table 1, above; and Chothia 1987).

[0495] For example, an anti-BCMA antibody can comprise a VL CDR1 having the amino acid sequence SSNIGSNT (SEQ ID NO:322), a VL CDR2 having the amino acid sequence NYH, a VL CDR3 having the amino acid sequence AAWDDSLNGWV (SEQ ID NO:323)), a VH CDR1 having the amino acid sequence GFTFGDYA (SEQ ID NO: 324), a VH CDR2 having the amino acid sequence SRSKAYGGTT (SEQ ID NO:325), and a VH CDR3 having the amino acid sequence ASSGYSSGWTPFDY (SEQ ID NO:326).

[0496] An anti-BCMA antibody can be a scFv. As one non-limiting example, an anti-BCMA scFv can comprise the following amino acid sequence: QVQLVQSGAEVKKPGSSVKVSCKASGGTFSNYWMHWVRQAPGQGLEWMGATY RGHSDTYYNQKFKGRVTITADKSTSTAYMELSSLRSEDTAVYYCARGAIYNGYDVLDNWGQGTLVTVSSGGGGSGG GGSGGGGSGGGGSDIQMTQSPSSLSASVGDRVTITCSASQDISNYLNWYQQKPGKAPKLLIYYTSNLHSGVPSRFS GSGSGTDFTLTISSLQPEDFATYYCQQYRKLPWTFGQGTKLEIKR (SEQ ID NO:327).

[0497] As another example, an anti-BCMA scFv can comprise the following amino acid sequence: DIQMTQSPSS LSASVGDRVTITCSASQDISNYLNWYQQKPGKAPKLLIYYTSNLHSGVPSRFSGSGSGTDFTLTISSLQPEDFATYYC QQYRKLPWTFGQGTKLEIKRGGGGSGGGGSGGGGSGGGGSQVQLVQSGAEVKKPGSSVKVSCKASGGTFSNYW MHWVRQAPGQGLEWMGATYRGHSDTYYNQKFKGRVTITADKSTSTAYMELSSLRSEDTAVYYCARGAIYNGYDVL DNWGQGTLVTVSS (SEQ ID NO:328).

[0498] In some cases, an anti-BCMA antibody can comprise a VL CDR1 having the amino acid sequence SASQDISNYLN (SEQ ID NO:329); a VL CDR2 having the amino acid sequence YTSNLHS (SEQ ID NO:330); a VL CDR3 having the amino acid sequence QQYRKLPWT (SEQ ID NO:331); a VH CDR1 having the amino acid sequence NYWMH (SEQ ID NO:332); a VH CDR2 having the amino acid sequence ATYRGHSDTYYNQKFKG (SEQ ID NO: 333); and a VH CDR3 having the amino acid sequence GAIYNGYDVLDN (SEQ ID NO:334).

[0499] In some cases, an anti-BCMA antibody comprises: a) a light chain comprising an amino acid sequence having at least 90%, at least 95%, at least 98%, at least 99%, or 100%, amino acid sequence identity to the following amino acid sequence: DIQMTQSPSSLSASVGDRVTITCSASQDISNYLNWYQQKPGKAPKLLIYYTSNLHSGVPSRFS GSGSGTDFTLTISSLQPEDFATYYCQQYRKLPWTFGQGTKLEIKR (SEQ ID NO:335).

[0500] In some cases, an anti-BCMA antibody comprises: a) a heavy chain comprising an amino acid sequence having at least 90%, at least 95%, at least 98%, at least 99%, or 100%, amino acid sequence identity to the following amino acid sequence: QVQLVQSGAEVKKPGSSVKVSCKASGGTFSNYWM HWVRQAPGQGLEWMGATYRGHSDT YYNQKFKGRVTITADKSTSTAYMELSSLRSEDTAVYYCARGAIYDGYDVLDNWGQGTLVTVSS (SEQ ID NO:336).

[0501] In some cases, an anti-BCMA antibody (e.g., an antibody referred to in the literature as belantamab) comprises a light chain comprising the amino acid sequence: DIQMTQSPSSLSASVGDRVTITCSASQDISNYLNWYQ QKPGKAPKLLIYYTSNLHSGVPSRFSGSGSGTDFTLTISSLQPEDFATYYCQQYRKLPWTFGQGTKLEIKR (SEQ ID NO: 335); and a heavy chain comprising the amino acid sequence: QVQLVQSGAEVKKPGSSVKVSCKASGGTFSNY WMHWVRQAPGQGLEWMGATYRGHSDTYYNQKFKGRVTITADKSTSTAYMELSSLRSEDTAVYYCARGAIYDGYDV LDNWGQGTLVTVSS (SEQ ID NO:336).

[0502] In some cases, the anti-BCMA antibody has a cancer chemotherapeutic agent linked to the antibody. For example, in some cases, the anti-BCMA antibody is GSK2857916 (belantamab-mafodotin), where monomethyl auristatin F (MMAF) is linked via a maleimidocaproyl linker to the anti-BCMA antibody belantamab.

### (8) Anti-MUC1

[0503] A CTP may be an antibody specific for MUC1. For example, a CTP can be specific for a MUC1 polypeptide present on a cancer cell. In some cases, the CTP is specific for the cleaved form of MUC1; see, e.g., Fessler et al. (2009) Breast Cancer Res. Treat. 118:113. A CTP may be an antibody specific for a glycosylated MUC1 peptide; see, e.g., Naito et al. (2017) ACS Omega 2:7493; and U.S. Pat. No. 10,017,580.

[0504] As one non-limiting example, a CTP can be a single-chain Fv specific for MUC1. See, e.g., Singh et al. (2007) Mol. Cancer Ther. 6:562; Thie et al. (2011) PloSOne 6: e15921; Imai et al. (2004) Leukemia 18:676; Posey et al. (2016) Immunity 44:1444; EP3130607; EP3164418; WO 2002/044217; and US 2018/0112007. A CTP may be an scFv specific for the MUC1 peptide VTSAPDTRPAP GSTAPPAHG (SEQ ID NO:337). A CTP may be an scFv specific for the MUC1 peptide SNIKFRPGSVVVQLTLAFREGTINVHDVETQFNQYKTEAASRY (SEQ ID NO:338). A CTP may be an scFv specific for the MUC1 peptide SVVVQLTLAFREGTINVHDVETQFNQYKTEAASRY (SEQ ID NO: 339). A CTP may be an scFv specific for the MUC1 peptide LAFREGTINVHDV ETQFNQY (SEQ ID NO:340). In some cases, a CTP is a scFv specific for the MUC1 peptide SNIKFRPGSVVVQLTLAAFREGTIN (SEQ ID NO:341).

[0505] As an example, an anti-MUC1 antibody can comprise: a VH CDR1 having the amino acid sequence RYGMS (SEQ ID NO:342); a VH CDR2 having the amino acid sequence TISGGGTYIYY PDSVKG (SEQ ID NO: 343); a VH CDR3 having the amino acid sequence DNYGRNYDYGMDY (SEQ ID NO:344); a VL CDR1 having the amino acid sequence SATSSVSYIH (SEQ ID NO:345); a VL CDR2 having the amino acid sequence STSNLAS (SEQ ID NO:346); and a VL CDR3 having the amino acid sequence QQRSSSPFT (SEQ ID NO:347). See, e.g., US 2018/0112007.

[0506] As another example, an anti-MUC1 antibody can comprise a VH CDR1 having the amino acid sequence GYAMS (SEQ ID NO:348); a VH CDR2 having the amino acid sequence TISSGGTYIYYP DSVKG (SEQ ID NO:349); a VH CDR3 having the amino acid sequence LGGDNYYEYFDV (SEQ ID NO:350); a VL CDR1 having the amino acid sequence RASKSVSTSGYSYMH (SEQ ID NO:351); a VL CDR2 having the amino acid sequence LASNLES (SEQ ID NO:352); and a VL CDR3 having the amino acid sequence QHSRELPFT (SEQ ID NO:353). See, e.g., US 2018/0112007.

[0507] As another example, an anti-MUC1 antibody can comprise a VH CDR1 having the amino acid sequence DYAMN (SEQ ID NO:354); a VH CDR2 having the amino acid sequence VISTFSGNINFN QKFKG (SEQ ID NO:355); a VH CDR3 having the amino acid sequence SDYYGPYFDY (SEQ ID NO:356); a VL CDR1 having the amino acid sequence RSSQTIVHSNGNTYLE (SEQ ID NO:357); a VL CDR2 having the amino acid sequence KVSNRFS (SEQ ID NO: 358); and a VL CDR3 having the amino acid sequence FQGSHVPFT (SEQ ID NO:359). See, e.g., US 2018/0112007.

[0508] As another example, an anti-MUC1 antibody can comprise a VH CDR1 having the amino acid sequence GYAMS (SEQ ID NO:348); a VH CDR2 having the amino acid sequence TISSGGTYIYYP DSVKG (SEQ ID NO:349); a VH CDR3 having the amino acid sequence LGGDNYYEY (SEQ ID NO:360); a VL CDR1 having the amino acid sequence TASKSVSTSGYSYMH (SEQ ID NO:361); a VL CDR2 having the amino acid sequence LVSNLES (SEQ ID NO: 362); and a VL CDR3 having the amino acid sequence QHIRELTRSE (SEQ ID NO:363). See, e.g., US 2018/0112007.

### (9) Anti-MUC16

[0509] In some cases, a CTP is an antibody specific for MUC16 (also known as CA125). See, e.g., Yin et al. (2002) Int. J. Cancer 98:737. For example, a CTP can be specific for a MUC16 polypeptide present on a cancer cell. See, e.g., US 2018/0118848; and US 2018/0112008. In some cases, a MUC16-specific CTP is a scFv. In some cases, a MUC16-specific CTP is a nanobody.

[0510] As one example, an anti-MUC16 antibody can comprise a VH CDR1 having the amino acid sequence GFTFSNYY (SEQ ID NO:364); a VH CDR2 having the amino acid sequence ISGRGSTI (SEQ ID NO:365); a VH CDR3 having the amino acid sequence VKDRGGYSPY (SEQ ID NO:366); a VL CDR1 having the amino acid sequence QSISTY (SEQ ID NO:367); a VL CDR2 having the amino acid sequence TAS; and a VL CDR3 having the amino acid sequence QQSYSTPPIT (SEQ ID NO:368). See, e.g., US 2018/0118848.

### (10) Anti-Claudin-18.2

[0511] In some cases, a CTP is an antibody specific for claudin-18 isoform 2 (“claudin-18.2”). See, e.g., WO 2013/167259. In some cases, a claudin-18.2-specific CTP is a scFv. In some cases, a claudin-18.2-specific CTP is a nanobody. A CTP may be an antibody specific for TEDEVQSYP SKHDYV (SEQ ID NO:240) or EVQSYPSKHDYV (SEQ ID NO:241).

[0512] As one example, an anti-claudin-18.2 antibody can comprise a VH CDR1 having the amino acid sequence GYTFTDYS (SEQ ID NO:369); a VH CDR2 having the amino acid sequence INTETGVP (SEQ ID NO:370); a VH CDR3 having the amino acid sequence ARRTGFDY (SEQ ID NO:371); a VL CDR1 having the amino acid sequence KNLLHSDGITY (SEQ ID NO:372); a VL CDR2 having the amino acid sequence RVS; and a VL CDR3 having the amino acid sequence VQVLELPFT (SEQ ID NO:373).

[0513] As another example, an anti-claudin-18.2 antibody can comprise a VH CDR1 having the amino acid sequence GFTFSSYA (SEQ ID NO:374); a VH CDR2 having the amino acid sequence ISDGGSYS (SEQ ID NO: 375); a VH CDR3 having the amino acid sequence ARDSYYDNSYVRDY (SEQ ID NO:376); a VL CDR1 having the amino acid sequence QDINTF (SEQ ID NO:377); a VL CDR2 having the amino acid sequence RTN; and a VL CDR3 having the amino acid sequence LQYDEFPLT (SEQ ID NO:378).

8 Epitopes and their Assessment

[0514] The chemical conjugation sites and chemistries described herein permit the incorporation of a molecule presenting a coronavirus epitope into an unconjugated T-Cell-MP to form a T-Cell-MP-coronavirus epitope conjugate. Molecules that may be conjugated to an unconjugated T-Cell-MP include those presenting a peptide epitope, phosphopeptide epitope, or glycopeptide epitope (such as those from the spike glycoprotein, nucleoprotein, membrane protein, replicase protein, non-structural protein (nsp) and the like); collectively an “epitope.” Epitopes of a T-Cell-MP conjugate are not part of the first or second polypeptide as translated from mRNA, but may be added to a T-Cell-MP at a chemical conjugation site. Selection of candidate MHC allele and peptide (e.g., phosphopeptide, lipopeptides or glycopeptide) epitope combinations for effective presentation to a TCR by a T-Cell-MP-epitope conjugate can be accomplished using any of a number of well-known methods to determine if the free peptide has affinity for the specific HLA allele used to construct the T-Cell-MP in which it will be presented as part of the epitope conjugate. It is also possible to determine if the peptide in combination with the specific heavy chain allele and β2M can affect the T cell in the desired manner (e.g., induction of cell activation, proliferation, anergy, or apoptosis). Applicable methods include binding assays and T cell activation assays.

[0515] It is possible to determine if an epitope in combination with the specific heavy chain allele and β2M sequence can affect the T cell in the desired manner (e.g., induction of proliferation, granule mediated responses, anergy, or apoptosis). Applicable methods include binding assays and T cell activation assays including BLI assays utilized for assessing binding affinity of T-Cell-MPs with wt. and variant MODs discussed above. See, e.g., published PCT Application WO 2020/243315 (Cue Biopharma, Inc.) at to [00347].

a. Epitopes

[0516] An epitope present in a T-Cell-MP-coronavirus epitope conjugate may be bound in an epitope-specific manner by a T cell (i.e., the epitope is specifically bound by an epitope-specific T cell whose TCR recognizes the peptide). An epitope-specific T cell binds an epitope having a reference aa sequence in the context of a specific MHC-H allele polypeptide/β2M complex, but does not substantially bind an epitope that differs from the reference aa sequence presented in the same context. For example, an epitope-specific T cell may bind an epitope in the context of a specific MHC-H allele polypeptide/β2M complex having a reference aa sequence, and may bind an epitope that differs from the reference aa sequence presented in the same context, if at all, with an affinity that is less than 10⁻⁶ M, less than 10⁻⁵ M, or less than 10⁻⁴ M. An epitope-specific T cell may bind an epitope (e.g., a peptide presenting an epitope of interest) for which it is specific with an affinity of at least 10⁻⁷ M, at least 10⁻⁸ M, at least 10⁻⁹ M, or at least 10⁻¹⁰ M.

[0517] In some cases, the peptide epitope present in a T-Cell-MP-coronavirus epitope conjugate presents an epitope-specific to an HLA-A, -B, -C, -E, -F or -G allele. In an embodiment, the peptide epitope present in a T-Cell-MP presents an epitope restricted to HLA-A*0101, A*0201, A*0301, A*1101, A*2301, A*2402, A*2407, A*3303, and/or A*3401. In an embodiment, the peptide epitope present in a T-Cell-MP presents an epitope restricted to HLA-B*0702, B*0801, B*1502, B3501, B*3802, B*4001, B*4402, B*4601, and/or B*5301. In an embodiment, the peptide epitope present in a T-Cell-MP presents an epitope restricted to C*0102, C*0303, C*0304, C*0401, C*0602, C*0701, C*702, C*0801, and/or C*1502. In an embodiment, the peptide epitope present in a T-Cell-MP presents an epitope restricted to HLA-E, e.g., HLA-E*0101 (HLA-E*01:01:01:01), HLA-E*01:03 (HLA-E*01:03:01:01), HLA-E*01:04, HLA-E*01:05, HLA-E*01:06, HLA-E*01:07, HLA-E*01:09, and HLA-E*01:10. Of these, isoforms HLA-E*0101 and HLA-E*01.03 are of particular note since these are highly prevalent alleles, and differ by only 1 aa (Arg or Gly at position 107).

[0518] Among the epitopes that may be bound and presented to a TCR by a T-Cell-MP with a class I MHC-H and a β2M polypeptide sequence are antigens from infectious agents (e.g., viral or bacterial agents), particularly coronaviruses. Particular coronavirus antigens are selected from structural proteins or surface protein antigens, particularly antigens (or epitopes) derived from spike (S protein or surface glycoprotein), membrane protein (M or membrane glycoprotein), envelope protein (E) or nucleocapsid (N) protein. Coronavirus antigens may also be non-structural proteins (NSPs).

### (i) Epitopes Present in Coronavirus-Associated Antigens

[0519] A peptide presenting one or more epitopes (a peptide epitope) presented by a T-Cell-MP-epitope conjugate may be a peptide that presents an epitope derived from a coronavirus protein (e.g., Core and iCore peptides that differ from coronavirus peptides, see FIGS. 20A-20J, and FIG. 21). A portion of a coronavirus protein that presents one or more epitopes is referred to herein as a coronavirus peptide epitope. A coronavirus peptide epitope present in a T-Cell-MP-coronavirus epitope conjugate can comprise a peptide having from 4 to 25 contiguous aas (e.g., 4 aa, 5 aa, 6 aa, 7 aa, 8 aa, 9 aa, 10 aa, 11 aa, 12 aa, 6-15 aa, 7-15 aa, 10⁻¹⁵ aa, 15-20 aa, or 20-25 aa) of an aa sequence having at least 80%, at least 90%, at least 95%, or 100% aa sequence identity to any of the aa sequences depicted in Table 2, FIGS. 20A to 20J, or FIG. 21. A peptide presenting a coronavirus epitope present in a T-Cell-MP-coronavirus epitope conjugate can be a peptide having from 4 to 25 contiguous aas (e.g., 4aa, 5aa, 6 aa, 7 aa, 8 aa, 9 aa, 6-12 aa, 8-15 aa, 15-20 aa, or 20-25 aa) of an aa sequence having at least 80%, at least 90%, at least 95%, or 100% aa sequence identity to any one of the coronavirus aa sequences depicted in FIG. 21, FIG. 22, Table 2, Table 3, or Table 3a.

[0520] Coronavirus human T cell epitopes present in a T-Cell-MP-coronavirus epitope conjugate may comprise the aa sequence of any of the peptides (aa sequences) presented in FIG. 21. The peptide presenting a coronavirus epitope present in a T-Cell-MP-coronavirus epitope conjugate may comprise the sequence of a peptide presented under the heading “Peptide” in FIG. 21. The peptide presenting a coronavirus epitope present in a T-Cell-MP-coronavirus epitope conjugate may comprise the sequence of a peptide presented under the heading “Core” in FIG. 21. The peptide presenting a coronavirus epitope present in a T-Cell-MP-coronavirus epitope conjugate may comprise the sequence of a peptide presented under the heading “iCore” in FIG. 21. The peptide presenting a coronavirus epitope present in a T-Cell-MP-coronavirus epitope conjugate may comprise the aa sequence of a peptide of: surface glycoprotein, membrane protein, or nucleocapsid phosphoprotein in FIG. 21, or a sequence having one or two aa substitutions or deletions of any of those sequences. The peptide presenting a coronavirus epitope present in a T-Cell-MP-coronavirus epitope conjugate may comprise the aa sequence of a peptide of: open reading frame (ORF) 1b protein, ORF3a protein, ORF6 protein, ORF7a protein, ORF8 protein, or ORF10 protein in FIG. 21, or a sequence having one or two aa substitutions or deletions of any of those sequences. The peptide presenting a coronavirus epitope present in a T-Cell-MP-coronavirus epitope conjugate may comprise the aa sequence of a peptide of an envelope protein, membrane glycoprotein, nonstructural protein (nsp) one (nsp1), nsp2, nsp4, nsp6, nsp7, nsp8, nsp9, nsp10, nsp14, nsp15, or nsp16 in FIG. 21, or a sequence having one or two aa substitutions or deletions of any of those sequences. The peptide presenting a coronavirus epitope present in a T-Cell-MP-coronavirus epitope conjugate may comprise the aa sequence of a peptide of: nucleocapsid phosphoprotein, papain-like cysteine protease (PLpro), 3C-like protease (3CL), RNA-dependent RNA polymerase (RDpol), or helicase (Hel) in FIG. 21, or a sequence having one or two aa substitutions or deletions of any of those sequences.

[0521] Some suitable peptides presenting coronavirus epitopes for T-Cell-MP-epitope conjugate formation include those common to SARS-CoV and SARS-CoV-2set forth in Table 2 (see Grifoni et al., Cell Host & Microbe 27 (4): 671-680 (2020); Cell Host & Microbe (2020), https://doi.org/10.1016/j.chom.2020.03.002).

TABLE 2¹

| | HLA | SARS-CoV-2 | | Start and | |
|---|---|---|---|---|---|
| | Restric- | (Covid-19) | Coronavirus | End | Identity |
| SARS-CoV² Sequence | tion | Sequence³ | Protein⁴ | Position | Percent |
| GLMWLSYFV (381) | A*02:01 | GLMWLSYFI (382) | M | 89-97 | 89 |
| TLACFVLAAV (383) | A*02:01 | TLACFVLAAV (383) | M | 61-70 | 100 |
| ALNTPKDHI (384) | A*02:01 | ALNTPKDHI (384) | N | 138-146 | 100 |
| GMSRIGMEV (385) | A*02:01 | GMSRIGMEV (385) | N | 316-324 | 100 |
| LALLLLDRL (386) | A*02:01 | LALLLLDRL (386) | N | 219-227 | 100 |
| LLLDRLNQL (387) | A*02:01 | LLLDRLNQL (387) | N | 222-230 | 100 |
| LQLPQGTTL (388) | A*02:01 | LQLPQGTTL (388) | N | 159-167 | 100 |
| RLNQLESKV (389) | A*02:01 | RLNQLESKM (390) | N | 226-234 | 89 |
| ALSGVFCGV (391) | A*02:01 | SLPGVFCGV (392) | ORF 1ab | 2942-2950 | 78 |
| CLDAGINYV (393) | A*02:01 | CLEASFNYL (394) | ORF 1ab | 2139-2147 | 56 |
| ILLLDQVLV (395) | A*02:01 | ILLLDQALV (396) | ORF 1ab | 2498-2506 | 89 |
| LLCVLAALV (397) | A*02:01 | SACVLAAEC (398) | ORF 1ab | 2840-2848 | 56 |
| SMWALVISV (399) | A*02:01 | SMWALIISV (400) | ORF 1ab | 3661-3669 | 89 |
| TLMNVITLV (401) | A*02:01 | TLMNVLTLV (402) | ORF 1ab | 3639-3647 | 89 |
| WLMWFIISI (403) | A*02:01 | WLMWLIINL (404) | ORF 1ab | 2292-2300 | 67 |
| ALNTLVKQL (405) | A*02:01 | ALNTLVKQL (405) | S | 958-966 | 100 |
| FIAGLIAIV (406) | A*02:01 | FIAGLIAIV (406) | S | 1220-1228 | 100 |
| KLPDDFMGCV (407) | A*02:01 | KLPDDFTGCV (408) | S | 424-433 | 90 |
| LITGRLQSL (409) | A*02:01 | LITGRLQSL (409) | S | 996-1004 | 100 |
| NLNESLIDL (410) | A*02:01 | NLNESLIDL (410) | S | 1192-1200 | 100 |
| RLNEVAKNL (411) | A*02:01 | RLNEVAKNL (411) | S | 1185-1193 | 100 |
| SIVAYTMSL (412) | A*02:01 | SIIAYTMSL (413) | S | 691-699 | 89 |
| VLNDILSRL (414) | A*02:01 | VLNDILSRL (414) | S | 976-984 | 100 |
| QFKDNVILL (415) | A*24:02 | NFKDQVILL (416) | N | 345-353 | 78 |
| GETALALLLL (417) | B*40:01 | GDAALALLLL (418) | N | 215-224 | 80 |
| MEVTPSGTWL (419) | B*40:01 | MEVTPSGTWL (419) | N | 322-331 | 100 |
| RFFTLGSITAQPVKI (420) | B*58:01 | RIFTIGTVTLKQGEI (421) | ORF 3a | 6-20 | 40 |
| SITAQPVKI (422) | B*58:01 | TVTLKQGEI (423) | ORF 3a | 12-20 | 22 |
| HLRMAGHSL (424) | Class I | HLRIAGHHL (425) | M | 148-156 | 78 |
| TKQYNVTQAF (426) | Class I | TKAYNVTQAF (427) | N | 265-274 | 90 |

¹SEQ ID NOs. are given in parenthesis following each sequence. Restrictions defined only in HLA-transgenic mice are indicated by the italicized font.
²SARS-CoV TOR-2 strain (see Grifoni https://doi.org/10.1016/j.chom.2020.03.002 at FIG. 1) and Dwyer, O. BMJ, 326(7397): 999 (2003).
³SARS-CoV-2 Wuhan-Hu-1 see Grifoni https://doi.org/10.1016/j.chom.2020.03.002 at FIG. 1.
⁴S, surface glycoprotein; M, membrane protein; N, nucleocapsid phosphoprotein, ORF 1ab polyprotein (see NCBI Reference Sequence: YP_009724389.1).

[0522] A peptide presenting a coronavirus epitope present in a T-Cell-MP-coronavirus epitope conjugate may comprise a peptide having from 6 to 25 contiguous aas (e.g., 6 aa, 7 aa, 8 aa, 9 aa, 8-15 aa, or 15-20 aa) of an aa sequence having at least 80%, at least 90%, at least 95%, or 100% aa sequence identity to any one of the coronavirus aa sequences depicted in Table 2.

[0523] The peptide presenting a coronavirus epitope present in a T-Cell-MP-coronavirus epitope conjugate may comprise a peptide set forth in Table 2 or an aa sequence having 1 or 2 aa substitutions, deletions or insertions in any of those peptide sequences. In some cases, the epitope may comprise a surface glycoprotein peptide. In some cases, the epitope may comprise a membrane protein peptide. In some cases the epitope may comprise a nucleocapsid phosphoprotein peptide. In some cases, the epitope may comprise an ORF 1ab polyprotein peptide from Table 2.

[0524] The SARS-CoV-2 human T cell epitopes present in a T-Cell-MP-coronavirus epitope conjugate may comprise a peptide of a protein set forth in FIG. 22, or an aa sequence having 0, 1, or 2 aa substitutions, deletions or insertions in any of the proteins or peptide sequences in FIG. 22. See Grifoni et al., Cell Host & Microbe 27:1-10 (2020); Cell Host & Microbe (2020), https://doi.org/10.1016/j.chom.2021.05.010 for a discussion of the epitopes along with the HLA alleles capable of presenting them. The peptide presenting a coronavirus epitope present in a T-Cell-MP-coronavirus epitope conjugate may comprise the aa sequence of a peptide of an envelope protein (E), membrane glycoprotein (M), or nucleocapsid phosphoprotein (nucleocapsid protein or “N”) set forth in FIG. 22, or a sequence having one or two aa substitutions or deletions of any of those sequences. The peptide presenting a coronavirus epitope present in a T-Cell-MP-coronavirus epitope conjugate may comprise the aa sequence of a peptide of: nonstructural protein (nsp) NSP1, NSP2, NSP3, NSP6, NSP7, NSP8, NSP9, NSP10, NSP12, NSP13, NSP14, NSP15, or NSP16 set forth in FIG. 22, or a sequence having one or two aa substitutions or deletions of any of those sequences. The peptide presenting a coronavirus epitope present in a T-Cell-MP-coronavirus epitope conjugate may comprise the aa sequence of a peptide of: open reading frame (ORF) ORF3a, ORF6, ORF7a, ORF7b, ORF8, or ORF10 set forth in FIG. 22, or a sequence having one or two aa substitutions or deletions of any of those sequences.

[0525] The peptide presenting a coronavirus epitope present in a T-Cell-MP-coronavirus epitope conjugate may comprise the aa sequence of a peptide of a: surface glycoprotein (spike protein or S protein) set forth in FIG. 20J, a peptide of a coronavirus surface glycoprotein (spike protein) set forth in FIG. 22, or a sequence having 1, or 2 aa substitutions, insertions, or deletions in any of those sequences.

[0526] Some suitable SARS-CoV-2 spike protein epitopes for T-Cell-MP-epitope conjugate formation and the HLA alleles presenting them are set forth in Table 3 (derived from Grifoni et al., Cell Host and Microbe 29 (7): 1076-1092 (2021). Those spike protein epitopes along are provided in Table 3.

TABLE 3^{†,‡}

| SARS-CoV | HLA- | Coronavirus | SARS-CoV | HLA- | Coronavirus |
|---|---|---|---|---|---|
| Sequence¹ | Restriction | Protein² | Sequence | Restriction | Protein |
| STQDLFLPFF (428) | A*01:01 | S | YYVGYLQPRTF (429) | A*24:02 | S |
| FCNDPFLGVYY (430) | A*01:01 | S | NYNYLYRLF (431) | A*24:02 | S |
| SSANNCTFEY (432) | A*01:01 | S | YFPLQSYGF (433) | A*24:02 | S |
| STECSNLLLQY (434) | A*01:01 | S | VYDPLQPELDSF (435) | A*24:02 | S |
| YTNSFTRGVY (436) | A*01:01, | S | YEQYIKWPWYI (437) | A*24:02 | S |
| | A*26:01 | | | | |
| CVADYSVLY (438) | A*01:01, | S | KWPWYIWLGF (439) | A*24:02 | S |
| | A*26:01, | | | | |
| | A*29:02, | | | | |
| | B*15:01 | | | | |
| LTDEMIAQY (440) | A*01:01, | S | GTITSGWTF (441) | A*24:02, B*57:01 | S |
| | A*29:02, | | | | |
| | B*35:01, | | | | |
| | C*07:02 | | | | |
| KIADYNYKL (442) | A*02:01 | S | QYIKWPWYI (443) | A*24:02, C*06:02 | S |
| KLPDDFTGCV (408) | A*02:01 | S | RFDNPVLPF (444) | A*24:02, C*07:02 | S |
| SFELLHAPATV (445) | A*02:01 | S | EILDITPCSF (446) | A*26:01 | S |
| LLFNKVTLA (447) | A*02:01 | S | FVFKNIDGY (448) | A*26:01, A*29:02 | S |
| VLNDILSRL (414) | A*02:01 | S | SVASQSIIAY (449) | A*26:01, A*29:02 | S |
| RLDKVEAEV (450) | A*02:01 | S | WTAGAAAYY (451) | A*26:01, | S |
| | | | | A*29:02, B*35:01 | |
| RLQSLQTYV (452) | A*02:01 | S | VASQSIIAY (453) | A*29:02, | S |
| | | | | B*15:01, B*35:01 | |
| HLMSFPQSA (454) | A*02:01 | S | TPINLVRDL (455) | B*07:02 | S |
| RLNEVAKNL (411) | A*02:01 | S | SPRRARSVA (456) | B*07:02 | S |
| NLNESLIDL (410) | A*02:01 | S | APHGVVFLHV (457) | B*07:02 | S |
| FIAGLIAIV (406) | A*02:01 | S | LPQGFSAL (458) | B*07:02, B*08:01 | S |
| VVFLHVTYV (459) | A*02:01, | S | QPYRVVVL (460) | B*07:02, B*08:01 | S |
| | A*02:06 | | | | |
| YLQPRTFLL (461) | A*02:01, | S | MIAQYTSAL (462) | B*07:02, B*08:01 | S |
| | A*24:02, | | | | |
| | B*08:01 | | | | |
| SIIAYTMSL (413) | A*02:01, | S | FPQSAPHGVVF (463) | B*08:01, B*35:01 | S |
| | B*08:01 | | | | |
| TLDSKTQSL (464) | A*02:01, | S | SEPVLKGVKL (465) | B*40:01 | S |
| | B*08:01, | | | | |
| | C*07:02 | | | | |
| KCYGVSPTK (466) | A*03:01 | S | TEKSNIIRGW (467) | B*44:02, B*44:03 | S |
| TVYDPLQPELDSFK | A*03:01 | S | TECSNLLLQY (469) | B*44:02, B*44:03 | S |
| (468) | | | | | |
| GVYFASTEK (470) | A*03:01, | S | REGVFVSNGTHW (471) | B*44:03 | S |
| | A*11:01, | | | | |
| | A*68:01 | | | | |
| GTHWFVTQR (472) | A*11:01, | S | | | |
| | A*31:01 | | | | |

^{^{†}}SEQ ID NO is given in parenthesis following each sequence.
^{^{‡}}S, surface glycoprotein (see NCBI Reference Sequence: YP_009724389.1).

[0527] Because coronaviruses like SARS-CoV-2 continuously evolve as genetic mutations occur during replication, they produce of a variety of related variants. A number of emerging coronavirus variants (e.g., SARS-CoV-2 variants) are listed as being Variants of Concern (VOC), Variants of Interest (VOI), Variants Being Monitored (VBM) or Variant of High Consequence (VOHC). At present include VBMs include the: Alpha (B.1.1.7 and Q lineages, Beta (B.1.351 and descendent lineages), Gamma (P.1 and descendent lineages), Epsilon (B.1.427 and B.1.429), Eta (B.1.525), lota (B.1.526), Kappa (B.1.617.1), 1.617.3, Mu (B.1.621, B.1.621.1) and Zeta (P.2). Currently the delta variant Delta (B. 1.617.2 and AY lineages) and Omicron (B.1.1.529 and BA lineages) are VOC. See, e.g., www.cdc.gov/coronavirus/2019-ncov/variants/variant-info.html#Concern. Those variants have been sequenced and mutations identified relative to the SARs-CoV-2 sequences NCBI Accession NC_045512.2 (see, e.g., https://www.ncbi.nlm.nih.gov/sars-cov-2/), designated as the wild-type. For example, variants in the spike protein may be designated relevant to NCBI Ref. Seq. YP_009724390.1. The variant mutations include numerous amino acid changes, including substitutions and deletions in, for example, the surface glycoprotein or spike(S) protein. The mutations may make the variant less susceptible to circulating antibodies in vaccinated individuals and may alter (e.g., increase) the transmission, give rise to more severe disease, and even increase mortality.

[0528] Going forward it is expected that additional VOCs, VOIs, VBMs and potentially even VOHCs will arise. The modular nature of the T-Cell-MP system described herein permits the rapid preparation of coronavirus epitope-conjugates capable of presenting epitopes presented by coronavirus variants, or the use of redirected T-Cell-MP-epitope conjugates as discussed below to address variants. For example, one skilled in the art can sequence coronavirus variants and compare them to the wild-type sequence to determine altered or new epitopes for the variant(s). This is within the skill and capability of one skilled in the art including by direct sequence comparison. For instance, surface glycoprotein sequences for each of the alpha (UK B1.1.7), beta (B1.351; QRN78347.1), gamma (P.1) delta (B1.617.2; QWK65230.1), and omicron (B.1.1.529) Sars-Cov2 variants were compared with wild-type Sars-Cov2 surface protein sequence. In particular, the surface glycoprotein epitope sequences epitopes provided in FIG. 21 were assessed and compared in each of the variants to identify mutations or amino acid changes in the epitope sequence. These provide epitopes and antigens specific for the variant(s), and can be utilized to include variants, or in the alternative to specifically target or treat one or more variant(s), using T-Cell-MPs. Some variant sequences for surface glycoprotein epitopes (variations bolded and italicized for emphasis) appearing in FIG. 21 include: KVGGNYNYR (SEQ ID NO:473), delta variant of KVGGNYNYL (SEQ ID NO:474); KGFNCYFPL (SEQ ID NO: 475), delta and beta variant of EGFNCYFPL (SEQ ID NO:476); DVYYHKNNK (SEQ ID NO:477), delta variant and GVY-HKNNK (SEQ ID NO:478) alpha variant of GVYYHKNNK (479); NSANLAAIK (SEQ ID NO:480), gamma variant of ASANLAATK (SEQ ID NO:481); RFANPVLPF (SEQ ID NO:482), beta variant of YYHKNNKSW (SEQ ID NO: 483); AYSNNSIAIPINF (SEQ ID NO:484), alpha variant of AYSNNSIAIPTNF (SEQ ID NO:485); PINLVRGL (SEQ ID NO: 486), beta variant of TPINLVRDL (SEQ ID NO:455); SRRRARSVA (SEQ ID NO:487), delta variant and SHRRARSVA (SEQ ID NO:488) alpha variant of SPRRARSVA (SEQ ID NO:456); IPINFTISV (SEQ ID NO:489), alpha variant of IPTNFTISV (SEQ ID NO:490); NLRTRTQL (SEQ ID NO:491), delta variant and NFTNRTQL (SEQ ID NO: 492) gamma variant of NLTTRTQL (SEQ ID NO:493); LXXXHRSYL (where each X is absent or any amino acid, SEQ ID NO:494), beta variant of LLALHRSYL (SEQ ID NO:495); LPSAYTNSF (SEQ ID NO:496), gamma variant of LPPAYTNSF SEQ ID NO:497); and AEYVNNSY (SEQ ID NO:498), gamma variant of AEHVNNSY (SEQ ID NO: 499).

[0529] Other suitable coronavirus peptides that can serve as peptides presenting coronavirus epitopes include spike protein sequences of the Wuhan-Hu1 strain (FIG. 20J at A, SEQ ID NO:566) having one or more insertions, deletions or substitutions found in the delta and/or omicron strains selected from the group consisting of T19R, A67V, del69-70, (V70F*), T95I, G142D, del142-144, Y145D, R158G, del211, L212I, ins214EPE, (A222V*), (W258L*), G339D, S371L, S373P, S375F, K417N, N440K, G446S, L452R, S477N, T478K, E484A, Q493R, G496S, Q498R, N501Y, Y505H, T547K, D614G, H655Y, N679K, P681H, P681R, N764K, D796Y, N856K, D950N, Q954H, N969K, and L981F. The substitutions may also be selected from T95I, K417N*T478K, and D614G, which are common to both the delta and omicron strain. A suitable SARS-CoV-2 spike protein epitope may comprise a peptide from about 6 to about 25 contiguous aas (e.g., from about 6 to about 15 aas) of the coronavirus delta variant spike protein sequence provided in FIG. 20J at B, optionally having 1 or 2 aa substitutions. A suitable SARS-CoV-2 spike protein epitope may comprise a peptide from about 6 to about 25 contiguous aas (e.g., from about 6 to about 15 aas) of the coronavirus omicron variant spike protein sequence provided in FIG. 20J at C, optionally having 1 or 2 aa substitutions.

[0530] Advantageously, peptides presenting coronavirus epitopes associated with memory T cells (see, e.g., Table 3a) may be employed as epitopes in the T-Cell-MPs described herein.

TABLE 3a
Coronavirus Epitopes Associated with Memory T Cells

| | | | Reported | % of | |
|---|---|---|---|---|---|
| HLA | | Parent | Affinity | Patients | Variant |
| Allele | Peptide Epitope | protein | (nM) | (Screen) | of Concern |
| A*02:01 | KLWAQCVQL (699) | ORF1ab | 17.7 | 88.9 | |
| A*02:01 | YLQPRTFLL (461) | S | 5.4 | 77.8 | |
| A*02:01 | LLYDANYFL (706) | ORF3a | 3.1 | 88.9 | |
| A*02:01 | LFYDANYFL (380) | ORF3a | | | B.1.617.2 BA.2 |
| A*02:01 | ALWEIQQVV (700) | ORF1ab | 7.8 | 88.9 | |
| A*02:01 | LLLDRLNQL (387) | N | 14.8 | 33.3 | |
| A*02:01 | YLFDESGEFKL (709) | ORF1ab | 22.2 | 44.4 | |
| A*02:01 | YLFDESGDFKL (709) | ORF1ab | | | B.1.1.7 |
| A*02:01 | GLMWLSYFI (382) | M | | | |
| A*02:01 | HLVDFQVTI (707) | ORF6 | | | |
| A*02:01 | HLVGFQVTI (707) | ORF6 | | | BA.5 |
| A*02:01 | FLLNKEMYL (695) | ORF1ab | | | |
| A*02:01 | RLQSLQTYV (452) | S | | | |
| A*01:01 | FTSDYYQLY (1545) | ORF3a | 3.2 | 100 | |
| A*01:01 | TTDPSFLGRY (612) | ORF1ab | 7.2 | 100 | |
| A*01:01 | TTDLSFLGRY (612) | ORF1ab | | | B.1.617.2 |
| A*01:01 | PTDNYITTY (1816) | ORF1ab | 6.1 | 80 | |
| A*01:01 | ATSRTLSYY (1329) | M | 16.7 | 60 | |
| A*01:01 | CTDDNALAYY (602) | ORF1ab | 5.3 | 100 | |
| A*01:01 | NTCDGTTFTY (1494) | ORF1ab | 121.8 | 60 | |
| A*01:01 | DTDFVNEFY (1543) | ORF1ab | 2.8 | 40 | |
| A*01:01 | GTDLEGNFY (1430) | ORF1ab | 6 | 40 | |
| A*01:01 | LTDEMIAQY (440) | S | | | |
| A*01:01 | ALSKGVHFV (703) | ORF3a | | | |
| A*01:01 | SLSKGVHFV (2043) | ORF3a | | | B.1.351 |
| A*01:01 | ALSKGVYFV (2044) | ORF3a | | | B1.1.529 BA.2 |
| A*03:01 | KTFPPTEPK (1447) | N | 20.8 | 100 | |
| A*03:01 | KIFPPTEPK (2045) | N | | | B.1.351 |
| A*03:01 | KCYGVSPTK (466) | S | 152.6 | 100 | |
| A*03:01 | KCYGVSLTK (2046) | S | | | B.1.351 |
| A*03:01 | VTNNTFTLK (751) | ORF1ab | 19.8 | 40 | |
| A*03:01 | KTIQPRVEK (1796) | ORF1ab | 113.2 | 40 | |
| A*11:01 | KTFPPTEPK (1447) | N | 6.3 | 100 | |
| A*11:01 | KIFPPTEPK (2045) | N | | | B.1.351 |
| A*11:01 | VTDTPKGPK (1520) | ORF1ab | 160.6 | 60 | |
| A*11:01 | ATEGALNTPK (1448) | N | 55.5 | 80 | |
| A*11:01 | ATDGALNTPK (2047 | | | | BA.5 |
| A*11:01 | ASAFFGMSR (825) | N | 14.4 | 40 | |
| A*11:01 | ATSRTLSYYK (811)) | M | 7.9 | 60 | |
| A*11:01 | KSTNLVKNK (2048) | S | | | |
| A*11:01 | STFNVPMEK (1888) | ORF1ab | | | |
| A*11:01 | ASMPTTIAK (1890) | ORF1ab | | | |
| A*11:01 | SAFAMMFVK (821) | ORF1ab | | | |
| A*24:02 | QYIKWPWYI (443) | S | 13.2 | 60 | |
| A*24:02 | VYFLQSINF (877) | ORF3a | 47.4 | 80 | |
| A*24:02 | VYIGDPAQL (848) | ORF1ab | 206 | 40 | |
| B*07:02 | SPRWYFYYL (986) | N | 6.3 | 80 | |
| B*07:02 | RPDTRYVL (1383) | ORF1ab | 56.9 | 80 | |
| B*07:02 | IPRRNVATL (944) | ORF1ab | 5.1 | 20 | |
| B*07:02 | KPRQKRTAT (1480) | N | | | |
| B*07:02 | FPRGQGVPI (1478) | N | | | |
| B*07:02 | RAAEIRASA (2049) | S | | | |
| B*07:02 | SPRRARSVA (456) | S | | | |
| B*07:02 | SRRRARSVA (487) | S | | | B.1.617.2 |
| B*07:02 | SHRRARSVA (488) | S | | | B.1.1.7, P.1, |
| | | | | | B.1.1.529, BA.2, BA.5 |
| B*07:02 | SPRRARSVV (2050) | S | | | P1 |
| B*15:01 | AQFAPSASAF (1459) | N | | | |
| β27:05 | QRNAPRITF (1484) | N | | | |
| β27:05 | HRNAPRITF (2051) | N | | | B.1.351 |
| β27:05 | LRNAPRITF (2052) | N | | | B.1.617.2 |
| β27:05 | QRNALRITF (2053) | N | | | B.1.1.529, BA.2, BA.5 |
| β27:05 | QRNASRITF (2054) | N | | | B.1.351 |
| β27:05 | QRNAFRITF (2055) | N | | | BA.5 |
| B35:01 | TPSGTWLTY (1117) | N | | | |
| B35:01 | TPLGTWLTY (2056) | N | | | B.1.617.2 |
| B35:01 | LLNKHIDAY (1482) | N | | | |
| B35:01 | LPIGINITRF (1142) | S | | | |
| B40:01 | MEVTPSGTWL (419) | N | | | |
| B40:01 | MEVTPLGTWL (2057) | N | | | B.1.617.2 |
| B40:01 | IEYPIIGDEL (1163) | ORF1ab | | | |
| B40:01 | AEIRASANL (1234) | S | | | |

*SEQ ID NOs are provided in parenthesis after the sequence.

### (ii) Redirected T-Cell-MPs

[0531] The present disclosure also includes and provides for methods of redirecting a T cell (e.g., a CD8+ effector T cell) having a TCR directed to a specified epitope (e.g., a specified epitope of a SARS-CoV-2 protein) toward tissues or cells (e.g., neoplastic cells that are benign (comprised of non-cancerous cells), precancerous, or malignant (comprised of cancerous cells) utilizing a “redirected T-Cell-MP-epitope conjugate”. Redirected T-Cell-MP-epitope conjugates are T-Cell-MP-epitope conjugates that bear at least one targeting sequences (e.g., CTPs) that bind to and directed the T-Cell-MP-epitope conjugate to one or more markers found on specific tissues or cells (e.g., found on neoplastic cells). For example, T cells (e.g., a CD8+ effector T cell) having a TCR directed to a specified epitope (e.g., an epitope of a SARS-CoV-2 protein) can be redirected toward cancerous cells through the use of a T-Cell-MP-epitope conjugate bearing one or more CTPs directed epitopes found on the cancerous cell as illustrated in FIG. 18. Targeting sequences are discussed in more detail above.

[0532] Where the T-Cell-MP-epitope conjugate includes targeting sequence(s) directed against one or more cancer antigens (e.g., CTPs) that direct the T-Cell-MP-epitope conjugate to a target cancer cell or tissue, the epitope of the T-cell-MP-epitope conjugate (the epitope covalently bound to a chemical conjugation site) is advantageously one that binds T cells that are already are present in the patient, e.g., resulting from exposure to a foreign agent such as a coronavirus (e.g. SARS-CoV-2) and/or from vaccination (e.g. with a SARS-CoV-2 vaccine, e.g., Pfizer, Moderna or J&J). For example, the epitope can be an epitope present in a viral antigen encoded by a virus that infects a substantial number of the human population such as SARS-CoV-2, and for which a majority of the human population has T cells directed against the virus through infection and/or vaccination. Thus, for example, in order to prime, or increase the number of, T cells that will specifically bind and be stimulated by the T-cell-MP-epitope conjugate, the patient can be vaccinated, e.g., with a SARS-CoV-2 vaccine, prior to treatment with the T-Cell-MP-epitope conjugate. The result is that T cells present in the patient directed to epitopes other than those found on the neoplastic cells are effectively redirected to the target the neoplastic cells (e.g., cancer cells) by the targeting sequence (e.g., CTP). Activation of the T cells by the T-Cell-MP-epitope conjugate can result in killing of the targeted cell, e.g., through granule-dependent cytotoxic attack. Moreover, the ability to use more than one targeting sequence (e.g., CTPs against different cancer antigens or different epitopes of a single antigen) can decrease the cancer's ability to mutate and thereby escape effective therapeutic intervention. See, e.g., FIG. 18.

[0533] A indicated above, the peptide conjugated to a redirected T-Cell-MP may present a coronavirus epitope. Where the T-Cell-MP comprises an HLA-E polypeptide sequence the peptide presenting a coronavirus epitope may be an HLA-E restricted epitope. Because of the essentially invariant nature of HLA-E molecules, such T-Cell-MP-epitope conjugates can be used to treat a large divers group of individuals having otherwise genetically diverse HLA genotypes using a single T-Cell-MP-epitope conjugate. An example of a SARs-Co-V epitope that may be employed is the Nsp 13 epitope VMPLSAPTL (SEQ ID NO:2058, aas 232-240 of the helicase provided in FIG. 20C), which can be conjugated to a redirected T-Cell-MP comprising an HLA-E heavy chain sequence to form an epitope conjugate that may engage T cells via the TCR and drive an adaptive immune response. VMPLSAPTL epitope does not, however, bind the inhibitory NKG2A receptors of NK cells, and accordingly, HLA-E presentation of VMPLSAPTL may also lead to NK cell cytotoxic activity (e.g., release of lytic granule contents (such as granzymes and perforin), and induction of apoptosis mediated by expression of Fas Ligand or TRAIL). Hammer et al., 2022, Cell Reports 38, 110503. Thus, T-Cell-MPs conjugated to that epitope directed to tumors or other target tissues may be utilized to locally stimulate NK cell action (e.g., by releasing the cells from CD94/NKG2A mediated suppression of those activities).

[0534] Peptides presenting epitopes other than coronavirus epitopes (e.g., other than SARS-CoV-2 epitopes) may also be employed with redirected T-Cell-MP to form epitope conjugates that target specific tissues or cells. Among the non-coronavirus epitopes that may be employed are those of other viral antigens. See, e.g., the list of viral antigens in Published PCT application WO 2020/243315 (Cue Biopharma, Inc.). The epitope may be chosen from a virus that infects a majority of the human population such as cytomegalovirus (CMV), Epstein-Barr virus (EBV), human papilloma virus, adenovirus, and the like, or which is included in a vaccine that can be administered to a patient prior to or concurrently with administration of the T-Cell-MP-epitope conjugate that includes a CTP.

[0535] Non-coronavirus epitopes that may be conjugated to T-Cell-MPs comprising an HLA-E aa polypeptide sequence (see e.g., FIG. 3 H) include those described by Huisman et al., (BioRxiv preprint posted Aug. 8, 2022, doi.org/10.1101/2022.08.03.502719). Because HLA-E-epitope complexes not only bind the TCR present on T cells, but may also engage both NK cell inhibitory CD94/NKG2A receptors and the NK cell stimulatory CD94/NKG2C receptors, different patterns of response can be obtained depending upon the epitope conjugated to the HLA-E containing T-Cell-MP. T-Cell-MP HLA-E restricted epitope conjugates that engage NK cell inhibitory NKG2A receptors conjugated to a T-Cell-MP would favor a T cell mediated response with less NK cell activation than would occur using an epitope that engages NK cell stimulatory NKG2C receptors conjugated to an otherwise identical T-Cell-MP. The extent and type of response obtained with a specific HLA-E restricted epitope conjugated to a T-Cell-MP in vitro or in vivo will depend upon, among other things, the level of CD94/NKG2A and CD94/NKG2C receptors present on the cells.

[0536] HLA-E restricted peptides that engage the CD94/NKG2A receptor that may be conjugated to a T-Cell-MP comprising an HLA-E polypeptide sequence include, but are not limited to: QMPSRSLLF (SEQ ID NO:2059), TLPKRGLFL (SEQ ID NO:2060), TGPWRSLWI (SEQ ID NO:2061), ILTDRSLWL (SEQ ID NO:2062), VNPGRSLFL (SEQ ID NO:2063), WNRLFPPLR (SEQ ID NO:2064), TLPERTLYL (SEQ ID NO:2065), FLPNRSLLF (SEQ ID NO: 2066), VMGDRSVLY (SEQ ID NO:2067), and VMADKSIFY (SEQ ID NO:2068).

[0537] HLA-E restricted peptides that engage the CD94/NKG2C receptor that may be conjugated to a T-Cell-MP comprising an HLA-E polypeptide sequence include, but are not limited to: VMPPRTLLL (SEQ ID NO.: 2069), VMAPRTLFL (SEQ ID NO:2070), VNPGRSLFL (SEQ ID NO:2063), QMPSRSLLF (SEQ ID NO.: 2071), TLPERTLYL (SEQ ID NO:2065), VMPGRTLCF (SEQ ID NO:2072), ILTDRSLWL (SEQ ID NO:262), RMPPRSVLL (SEQ ID NO: 2073), TAPARTMFL (SEQ ID NO.: 2074), and NMPARTVLF SEQ ID NO:2075. The peptide WNRILPNAY SEQ ID NO: 2076, may also be employed as an HLA-E restricted epitope. Other HLA-E restricted peptides that may be conjugated to an T-Cell-MP comprising an HLA-E polypeptide MHC-H sequence include those comprising the sequence X1-X2-X3-X4-R-X6-X7-X8-X9-X10, where: X1 is S, K, A, I, L, T, or absent; X2 is L, I, K or V; X3 is P, A or S; X4 is G, V, P, D or R; X6 is S or T; X7 is L, I, or V; X8 is F, W, or E; X9 is L. F, W or E; and X10 F, H, S, A or absent SEQ ID NO:2077. In two specific instances the HLA-E restricted peptide comprises the sequences LP (G or V) RSLFL SEQ ID NO:2078, or LP (G or V) RSLWL (SEQ ID NO:2079).

[0538] HLA-E restricted peptides from Peptides from CMV that may be conjugated to a T-Cell-MP comprising an HLA-E polypeptide sequence include, but are not limited to: VLPHRTQFL (SEQ ID NO:2080), TGAARSFFF (SEQ ID NO: 2081), and VMAPRTLIL (SEQ ID NO:2082). The CMV peptides SAPLKTRFL “(SEQ ID NO:2083), and SVPLKTRFL (SEQ ID NO:2084) may also be employed.

### 9 Payloads-Drug And Other Conjugates

[0539] A broad variety of payloads may be associated with unconjugated T-Cell-MPs and T-Cell-MP-coronavirus epitope conjugates, which may incorporate more than one type of payload conjugated (covalently) to the T-Cell-MPs at chemical conjugation sites. In addition, where the T-Cell-MP molecules or their epitope conjugates multimerize (e.g., form a heteroduplex using interspecific scaffolds), it may be possible to incorporate T-Cell-MPs with different payloads into a multimer. Accordingly, it is possible to introduce one or more payloads selected, for example, from the group consisting of anticancer or other therapeutic agents such as antiviral agents, antibiotics, diagnostic agents or labels, and the like.

[0540] T-Cell-MP polypeptides (e.g., a scaffold or Fc polypeptide) can be modified with crosslinking reagents to conjugate payloads and/or epitopes to the T-Cell-MP (e.g., at a chemical conjugation site such as an engineered cysteine or lysine). Exemplary crosslinking agents include, but are not limited to, succinimidyl 4-(N-maleimidomethyl)-cyclohexane-1-carboxylate (SMCC), sulfo-SMCC, maleimidobenzoyl-N-hydroxysuccinimide ester (MBS), sulfo-MBS or succinimidyl-iodoacetate. Introducing payloads using an excess of such crosslinking agents can result in multiple molecules of payload being incorporated into the T-Cell-MP. Some bifunctional linkers for introducing payloads into T-Cell-MPs and their epitope conjugates include cleavable linkers or non-cleavable linkers. In some cases, the payload linker is a protease-cleavable linker. Suitable payload linkers include, but are not limited to, molecules comprising peptides (e.g., from 2 to 10 amino acids in length; such as 2, 3, 4, 5, 6, 7, 8, 9, or 10 amino acids in length), alkyl chains, poly(ethylene glycol), disulfide groups, thioether groups, acid labile groups, photolabile groups, peptidase labile groups, or esterase labile groups. Non-limiting examples of suitable reagents for use as payload linkers include: N-succinimidyl-[(N-maleimidopropionamido)-tetraethyleneglycol]ester (NHS-PEG4-maleimide); N-succinimidyl 4-(2-pyridyldithio) butanoate (SPDB); N-succinimidyl 4-(2-pyridyldithio) 2-sulfobutanoate (sulfo-SPDB); N-succinimidyl 4-(2-pyridyldithio) pentanoate (SPP); N-succinimidyl-4-(N-maleimidomethyl)-cyclohexane-1-carboxy-(6-amidocaproate) (LC-SMCC); κ-maleimidoundecanoic acid N-succinimidyl ester (KMUA); γ-maleimide butyric acid N-succinimidyl ester (GMBS); ε-maleimidocaproic acid N-hydroxysuccinimide ester (EMCS); m-maleimide benzoyl-N-hydroxysuccinimide ester (MBS); N-(α-maleimidoacetoxy)-succinimide ester (AMAS); succinimidyl-6-(β-maleimidopropionamide) hexanoate (SMPH); N-succinimidyl 4-(p-maleimidophenyl) butyrate (SMPB); N-(p-maleimidophenyl) isocyanate (PMPI); N-succinimidyl 4 (2-pyridylthio) pentanoate (SPP); N-succinimidyl(4-iodo-acetyl)aminobenzoate (SIAB); 6-maleimidocaproyl (MC); maleimidopropanoyl (MP); p-aminobenzyloxycarbonyl (PAB); N-succinimidyl 4-(maleimidomethyl)cyclohexanecarboxylate (SMCC); N-succinimidyl-4-(N-maleimidomethyl)-cyclohexane-1-carboxy-(6-amidocaproate), a “long chain” analog of SMCC (LC-SMCC); 3-maleimidopropanoic acid N-succinimidyl ester (BMPS); N-succinimidyl iodoacetate (SIA); N-succinimidyl bromoacetate (SBA); and N-succinimidyl 3-(bromoacetamido) propionate (SBAP)

[0541] Control of the stoichiometry of the reaction between a T-Cell-MP and a payload or a crosslinker used to introduce a payload may result in some selective modification where engineered sites with chemistry orthogonal to all other groups in the molecule is not utilized. Reagents that display far more selectivity, such as the bis-thio linkers discussed above, tend to permit more precise control of the location and stoichiometry than reagents that react with single lysine, or cysteine residues.

[0542] Where a T-Cell-MP comprises a Fc polypeptide, the Fc polypeptide can comprise one or more covalently attached molecules of payload that are attached directly or indirectly through a linker. By way of example, where a T-Cell-MP comprises a Fc polypeptide, the polypeptide chain comprising the Fc polypeptide can be of the formula (A)-(L)-(C), where (A) is the polypeptide chain comprising the Fc polypeptide; where (L), if present, is a linker; and where (C) is a payload. (L), if present, links (A) to (C). In some cases, the polypeptide chain comprising the Fc polypeptide can be coupled to more than one molecule of payload (e.g., 2, 3, 4, 5, or more than 5 payload molecules).

[0543] Payloads may be selected from the group consisting of therapeutic agents, diagnostic agents (e.g., labels), nucleotide or nucleoside analogs, nucleic acids or synthetic nucleic acids (e.g., antisense nucleic acids, small interfering RNA, double stranded (ds) DNA, single stranded (ss) DNA, ssRNA, dsRNA), toxins, liposomes (e.g., incorporating a therapeutic agent), nanoparticles (e.g., gold or other metal bearing nucleic acids or other molecules, lipids, particle bearing nucleic acids or other molecules), and combinations thereof.

[0544] As discussed above, a polypeptide chain of a T-Cell-MP or its epitope conjugate can comprise a payload linked (e.g., covalently attached) to the T-Cell-MP polypeptide chain at one or more chemical conjugation sites. The linkage between a payload and a polypeptide chain of a T-Cell-MP may be a direct or an indirect linkage. Direct linkage can involve linkage directly to an amino acid side chain. Indirect linkage can be linkage via a linker. The payload (e.g., an anticancer agent) can be linked to a polypeptide chain (e.g., a Fc polypeptide) of an unconjugated T-Cell-MP or a T-Cell-MP-coronavirus epitope conjugate via a thioether bond, an amide bond, a carbamate bond, a disulfide bond, or an ether bond.

[0545] The polypeptide chain(s) of a T-Cell-MP may comprise as payload(s) one or more molecules of photo detectable labels (e.g., dyes, fluorescent labels, phosphorescent labels, luminescent labels), contrast agents (e.g., iodine or barium containing materials), radiolabels, imaging agents, spin labels, Forster Resonance Energy Transfer (FRET)-type labels, paramagnetic labels/imaging agents (e.g., gadolinium containing magnetic resonance imaging labels), ultrasound labels and combinations thereof.

[0546] In some embodiments, the payload comprises a label that is, or that includes, a radioisotope. Examples of radioisotopes or other labels include, but are not limited to, ³H, ¹¹C, ¹⁴C, ¹⁵N, ¹⁷O, ³⁵S, ¹⁸F, ³²P, ³³P, ⁶⁴Cu, ⁶⁸Ga, ⁸⁹Zr, ⁹⁰Y, ⁹⁹Tc, ¹²³I, ¹²⁴I, ¹²⁵I, ¹³¹I, ¹¹¹In, ¹³¹In, ¹⁵³Sm, ¹⁸⁶Re, ¹⁸⁸Re, ²¹¹At, ²¹²Bi, and ¹⁵³Pb.

### VII. NUCLEIC ACIDS

[0547] The present disclosure provides a nucleic acid comprising a nucleotide sequence encoding a T-Cell-MP or more than one T-Cell-MP (e.g., a pair of T-Cell-MPs that form an interspecific heteroduplex). The individual T-Cell-MPs of a heteromer (e.g., an interspecific pair forming a heteroduplex) may be encoded in separate nucleic acids. Alternatively, the T-Cell-MPs of a heteromeric T-Cell-MP (e.g., an interspecific pair) may also be encoded in a single nucleic acid. Such nucleic acids include those comprising a nucleotide sequence encoding a T-Cell-MP having at least one chemical conjugation site (e.g., cysteine residues) that are provided in the MHC-H, β2M or scaffold polypeptide sequences of the T-Cell-MP, or into any linker (e.g., an L3 linker) joining those polypeptide sequences.

### A. Nucleic Acids Encoding Unconjugated T-Cell-MPs

[0548] The present disclosure provides nucleic acids comprising nucleotide sequences encoding an unconjugated T-Cell-MP that may form higher order complexes (e.g., duplexes). The nucleotide sequences encoding an unconjugated T-Cell-MP may be operably linked to transcriptional control elements, e.g., promoters, such as promoters that are functional in a eukaryotic cell, where the promoter can be a constitutive promoter or an inducible promoter. As noted above, in some cases, the individual unconjugated T-Cell-MPs form heteromeric complexes (e.g., a heteroduplex T-Cell-MP comprising an interspecific scaffold pair). Heteromeric unconjugated T-Cell-MPs may be encoded in a single polycistronic nucleic acid sequence. Alternatively, heteromeric T cell-MPs may be encoded in separate monocistronic nucleic acid sequences with expression driven by separate transcriptional control elements. Where separate monocistronic sequences are utilized, they may be present in a single vector or in separate vectors.

[0549] The present disclosure includes and provides for a nucleic acid sequence encoding an unconjugated T-Cell-MP polypeptide that comprises (e.g., from N-terminus to C-terminus): (i) optionally one or more MOD polypeptide sequences (e.g., two or more MOD polypeptide sequences, such as in tandem, wherein when there are two or more MOD polypeptide sequences they are optionally joined to each other by independently selected L1 linkers); (ii) an optional L2 linker polypeptide sequence joining the one or more MOD polypeptide sequences to a β2M polypeptide sequence; (iii) the β2M polypeptide sequence; (iv) an optional L3 linker polypeptide sequence (e.g., from 10⁻⁵⁰ aa in length); (v) a class I MHC-H polypeptide sequence; (vi) an optional L4 linker polypeptide sequence; (vii) a scaffold polypeptide sequence (e.g., an Ig Fc sequence); (viii) an optional L5 linker polypeptide sequence; and (ix) optionally one or more MOD polypeptide sequence (e.g., two or more MOD polypeptide sequences, such as in tandem, wherein when there are two or more MOD polypeptide sequences they are optionally joined to each other by independently selected L6 linkers); wherein the unconjugated T cell modulatory polypeptide comprises at least one MOD polypeptide sequence (e.g., the MOD(s) of element (i) and/or (ix); and wherein at least one of the β2M polypeptide sequence, the L3 linker polypeptide sequence, and/or the MHC-H polypeptide sequence comprises a chemical conjugation site for epitope conjugation.

[0550] The present disclosure includes and provides for a nucleic acid sequence encoding an unconjugated T-Cell-MP polypeptide that comprises from N- to C-terminus: (i) optionally one or more MOD polypeptide sequences (e.g., two or more MOD polypeptide sequences, such as in tandem, wherein when there are two or more MOD polypeptide sequences they are optionally joined to each other by independently selected L1 linkers); (ii) an optional L2 linker polypeptide sequence; (iii) a β2M polypeptide sequence; (iv) an optional L3 linker polypeptide sequence (e.g., from 10-50 aa in length); (v) a class I MHC-H polypeptide sequence; (vi) an optional L4 linker polypeptide sequence; (vii) a scaffold polypeptide sequence (e.g., an Ig Fc sequence); (viii) an optional L5 linker polypeptide sequence; and (ix) optionally one or more MOD polypeptide sequence (e.g., two or more MOD polypeptide sequences, such as in tandem, wherein when there are two or more MOD polypeptide sequences they are optionally joined to each other by independently selected L6 linkers); wherein the unconjugated T cell modulatory polypeptide comprises at least one MOD polypeptide sequence (e.g., the MOD(s) of element (i) and/or (ix)); and wherein at least one of the β2M polypeptide sequence, the L3 linker polypeptide sequence, and/or the MHC-H polypeptide sequence comprises a chemical conjugation site for epitope conjugation.

[0551] The present disclosure includes and provides for a nucleic acid sequence encoding an unconjugated T-Cell-MP polypeptide that comprises from N- to C-terminus: (i) one or more MOD polypeptide sequences (e.g., two or more MOD polypeptide sequences, such as in tandem, wherein when there are two or more MOD polypeptide sequences they are optionally joined to each other by independently selected L1 linkers); (ii) an optional L2 linker polypeptide sequence; (iii) a β2M polypeptide sequence; (iv) an optional L3 linker polypeptide sequence (e.g., from 10-50 aa in length); (v) a class I MHC-H polypeptide sequence; (vi) an optional L4 linker polypeptide sequence; (vii) a scaffold polypeptide sequence (e.g., an Ig Fc sequence); (viii) an optional L5 linker polypeptide sequence; and (ix) optionally one or more MOD polypeptide sequence (e.g., two or more MOD polypeptide sequences, such as in tandem, wherein when there are two or more MOD polypeptide sequences they are optionally joined to each other by independently selected L6 linkers); wherein the unconjugated T cell modulatory polypeptide comprises at least one MOD polypeptide sequence (e.g., the MOD(s) of element (i) and/or (ix); and wherein at least one of the β2M polypeptide sequence, the L3 linker polypeptide sequence, and/or the MHC-H polypeptide sequence comprises a chemical conjugation site for epitope conjugation.

[0552] Suitable MHC-H, B2-microglobulin (β2M) polypeptide, and scaffold polypeptides are described above. The MHC-H polypeptide may be an HLA-A, HLA-B, HLA-C, HLA-E, HLA-F, or HLA-G heavy chain. In some cases, the MHC-H polypeptide comprises an amino acid sequence having at least 85% aa sequence identity to the amino acid sequence depicted in any one of FIGS. 3A-3H. In such an embodiment the MHC Class I heavy chain polypeptide may not include a transmembrane anchoring domain and intracellular domain (see, e.g., the MHC-H polypeptides in FIG. 3D). In some cases, the first MHC polypeptide comprises a 32-microglobulin (β2M) polypeptide; and the second MHC polypeptide comprises a MHC Class I heavy chain polypeptide. In some cases, the β2M polypeptide comprises an amino acid sequence having at least about 85% (e.g., at lease about 90%, 95%, 98%, 99%, or even 100%) aa sequence identity to a β2M amino acid sequence depicted in FIG. 4

### B. Recombinant Expression Vectors

[0553] The present disclosure provides recombinant expression vectors comprising a nucleic acid sequence encoding at least one T-Cell-MP (e.g., two or more T-Cell-MPs, as in, for example, an interspecific pair forming a duplex T-Cell-MP). In some cases, the recombinant expression vector is a non-viral vector. In some embodiments, the recombinant expression vector is a viral construct, e.g., a recombinant adeno-associated virus construct (see, e.g., U.S. Pat. No. 7,078,387), a recombinant adenoviral construct, a recombinant lentiviral construct, a recombinant retroviral construct, a non-integrating viral vector, etc.

[0554] Suitable expression vectors include, but are not limited to, viral vectors (e.g., viral vectors based on vaccinia virus; poliovirus; adenovirus (see, e.g., Li et al., Invest Opthalmol Vis Sci 35:2543 2549, 1994; Borras et al., Gene Ther 6:515 524, 1999; Li and Davidson, PNAS 92:7700 7704, 1995; Sakamoto et al., H Gene Ther 5:1088 1097, 1999; WO 94/12649, WO 93/03769; WO 93/19191; WO 94/28938; WO 95/11984 and WO 95/00655); adeno-associated virus (see, e.g., Ali et al., Hum Gene Ther 9:81 86, 1998, Flannery et al., PNAS 94:6916 6921, 1997; Bennett et al., Invest Opthalmol Vis Sci 38:2857 2863, 1997; Jomary et al., Gene Ther 4:683 690, 1997, Rolling et al., Hum Gene Ther 10:641 648, 1999; Ali et al., Hum Mol Genet 5:591 594, 1996; Srivastava in WO 93/09239, Samulski et al., J. Vir. (1989) 63:3822-3828; Mendelson et al., Virol. (1988) 166:154-165; and Flotte et al., PNAS (1993) 90:10613-10617); SV40; herpes simplex virus; human immunodeficiency virus (see, e.g., Miyoshi et al., PNAS 94:10319 23, 1997; Takahashi et al., J Virol 73:7812 7816, 1999); a retroviral vector (e.g., Murine Leukemia Virus, spleen necrosis virus, and vectors derived from retroviruses such as Rous Sarcoma Virus, Harvey Sarcoma Virus, avian leukosis virus, lentivirus, human immunodeficiency virus, myeloproliferative sarcoma virus, and mammary tumor virus); and the like.

[0555] Numerous suitable expression vectors are known to those of skill in the art, and many are commercially available. The following vectors are provided by way of example for eukaryotic host cells: pXT1, pSG5 (Stratagene®), pSVK3, pBPV, pMSG, and pSVLSV40 (Pharmacia). However, any other vector may be used so long as it is compatible with the host cell.

[0556] Depending on the host/vector system utilized, any of a number of suitable transcription and translation control elements, including constitutive and inducible promoters, transcription enhancer elements, transcription terminators, etc., may be used in the expression vector (see, e.g., Bitter et al. (1987), Methods in Enzymology, 153:516-544).

[0557] Non-limiting examples of suitable eukaryotic promoters (promoters functional in a eukaryotic cell) include those from cytomegalovirus (CMV) immediate early, herpes simplex virus (HSV) thymidine kinase, early and late SV40, long terminal repeats (LTRs) from retrovirus, and mouse metallothionein-I. Selection of the appropriate vector and promoter is well within the level of ordinary skill in the art. The expression vector may also contain a ribosome binding site for translation initiation and a transcription terminator. The expression vector may also include appropriate sequences for amplifying expression.

### VIII. METHODS OF GENERATING AND SELECTING T-CELL-MPS

[0558] The present disclosure provides a method of obtaining T-Cell-MPs (both unconjugated T-Cell-MPs and/or T-Cell-MP-epitope conjugates) including in duplex and other higher order aggregates, which may include one or more wt. MOD polypeptide sequences and/or one or more variant MOD polypeptide sequences that exhibit lower affinity for a Co-MOD compared to the affinity of the corresponding wt. MOD polypeptide sequence for the Co-MOD, the method comprising:
[0559] A) generating a T-Cell-MP (or a higher order complex such as a duplex) by introducing into cells or cell-free systems one or more nucleic acids encoding an unconjugated T-Cell-MP or each of the unconjugated T-Cell-MPs that make up a heteromer (e.g., a heterodimeric duplex of unconjugated T-Cell-MPs);
[0560] wherein when the T-Cell-MP comprises one or more nascent chemical conjugation sites, the nascent chemical conjugation site may be activated to produce an unconjugated T-Cell-MP with a chemical conjugation site (e.g., reacting sulfatase motifs with an FGE to convert a Cys residue to a fGly residue if the cells translating the T-Cell-MP nucleic acids do not express a formylglycine generating enzyme).

[0561] The above-mentioned method of generating T-Cell-MPs may further comprise providing one or more nucleic acids encoding the unconjugated T-Cell-MP, including those specifically described in the present disclosure, which may be present in a recombinant expression vector and/or operably linked to a transcriptional control element such as those functional in a eukaryotic cell. The method may be stopped at this point and the unconjugated T-Cell-MP (e.g., unconjugated duplex T-Cell-MP) that is unpurified (including cell lysates and unpurified media) may be obtained. Alternatively, the unconjugated T-Cell-MP may be purified using, for example, one or more of salt precipitation (e.g., ammonium sulfate), affinity chromatography, and/or size exclusion chromatography, to produce crude (less than 60% by weight), initially refined (at least 60% by weight), partly refined (at least 80% by weight), substantially refined (at least 95% by weight), partially pure or partially purified (at least 98% by weight), substantially pure or substantially purified (at least 99% by weight), essentially pure or essentially purified (at least 99.5% by weight) or purified (at least 99.8%) or highly purified (at least 99.9% by weight) unconjugated T-Cell-MP based on the total weight of protein present in the sample may be obtained by purification. Purification of T-Cell-MPs comprising an Ig Fc sequence may be purified by a method comprising chromatography on immobilized protein A or protein G, after which size based chromatographic separation (e.g., size exclusion chromatography) may be employed to further purify the T-Cell-MP. Where a T-Cell-MP-epitope conjugate is desired, the method may be continued by reacting anywhere from a crude preparation to a highly purified preparation of T-Cell-MP with an epitope presenting molecule as in step B:
[0562] B) providing an epitope (e.g., an epitope-presenting peptide) suitable for conjugation with the chemical conjugation site present in the unconjugated T-Cell-MP of step A (e.g., a hydrazinyl or hydrazinyl indole modified peptide for reaction with a formyl glycine of a sulfatase motif or a maleimide containing peptide for reaction with a cysteine residue), and contacting the epitope with the T-Cell-MP (e.g., under suitable reaction conditions) to produce a T-Cell-MP-epitope conjugate.

[0563] The choice of how purified the unconjugated T-Cell-MP entering into the conjugation reaction needs to be depends on a number of factors including, but not limited to, the conjugation reaction and conditions, the potential for side reactions, and the degree to which the final epitope conjugate will need to be purified for its intended use.

[0564] The T-Cell-MP-epitope conjugate (e.g., as a duplex or a higher order complex) may be purified by, for example, salt precipitation, size based separation (e.g., chromatography or dialysis), isoelectric focusing, and/or affinity chromatography, so that it is at least partly refined (at least 80% by weight of protein present in the sample), substantially refined (at least 95% by weight), partially pure or partially purified (at least 98% by weight), substantially pure or substantially purified (at least 99% by weight), essentially pure or essentially purified (at least 99.5% by weight), purified (at least 99.8%), or highly purified (at least 99.9% by weight) of the T-Cell-MP-epitope conjugate based on the total weight of protein present in the sample.

[0565] Where it is desirable for a T-Cell-MP or higher order complexes to contain a payload, the payload may be reacted with the unconjugated T-Cell-MP or the T-Cell-MP-epitope conjugate. The selectivity of the epitope and the payload for different conjugation sites may be controlled through the use of orthogonal chemistries and/or control of stoichiometry in the conjugation reactions. In embodiments, linkers (e.g., polypeptides or other bifunctional chemical linkers) may be used to attach the epitope and/or payloads to their conjugation sites.

[0566] A variety of cells and cell-free systems may be used for the preparation of unconjugated T-Cell-MPs. As discussed in the section titled “Genetically Modified Host Cells,” the cells may be eukaryotic origin, and more specifically of mammalian, primate or even human origin.

[0567] The present disclosure provides a method of obtaining an unconjugated T-Cell-MP or T-Cell-MP-epitope conjugate (or their higher order complexes, such as duplexes) comprising one or more wt. MODs and/or variant MODs that exhibit reduced affinity for a Co-MOD compared to the affinity of the corresponding parental wt. MOD for the Co-MOD. Where a variant MOD having reduced affinity is desired, the method can comprise preparing a library of variant MOD polypeptides (e.g., that have at least one insertion, deletion or substitution) and selecting from the library of MOD polypeptides a plurality of members that exhibit reduced affinity for their Co-MOD (such as by BLI as described above). Once a variant MOD is selected a nucleic acid encoding the unconjugated T-Cell-MP including the variant MOD is prepared and expressed. After the unconjugated T-Cell-MP has been expressed it can be purified, and if desired conjugated to an epitope to produce the selected T-Cell-MP-epitope conjugate. The process may be repeated to prepare a library of unconjugated T-Cell-MPs or their epitope conjugates.

[0568] The present disclosure provides a method of obtaining a T-Cell-MP-epitope conjugate or its higher order complexes, such as a duplex) that exhibits selective binding to a T cell, the method comprising:
[0569] A) generating a library of T-Cell-MP-epitope conjugates (or their higher order complexes) comprising a plurality of members, wherein each member comprises a different variant MOD on the T-Cell-MP-epitope conjugate, wherein the variant MOD differs in amino acid sequence (e.g., by from 1 aa to 10 aas) from its parental wt. MOD, and wherein the T-Cell-MP-epitope conjugate library members further comprise an epitope tag or a fluorescent label), and
[0570] B) contacting a T-Cell-MP-epitope conjugate library member with a target T cell expressing on its surface: i) a Co-MOD that binds the parental wt. MOD; and ii) a TCR that binds to the epitope;
[0571] C) selecting a T-Cell-MP-epitope conjugate library member that selectively binds the target T cell relative to its binding under the same conditions to a control T cell that comprises: i) the Co-MOD that binds the parental wt. MOD; and ii) a TCR that binds to an epitope other than the epitope present in the T-Cell-MP library member (e.g., choosing the T-Cell-MP-epitope conjugate that has higher avidity or affinity for the target T cell than the control T cell such as by BLI as described above).

[0572] A T-Cell-MP-epitope conjugate library member that is identified as selectively binding to a target T cell may be isolated from the library.

[0573] When the T-Cell-MP-epitope conjugate comprises an epitope tag or label, identifying a T-Cell-MP-epitope conjugate selective for a target T cell may comprise detecting the epitope tag or label associated with target and/or control T cells by using, for example, flow cytometry. While labeled T-Cell-MPs (e.g., fluorescently labeled) do not require modification to be detected, epitope tagged molecules may require contacting with an agent that renders the epitope tag visible (e.g., a fluorescent agent that binds the epitope tag). The affinity/avidity of the T-Cell-MP-epitope conjugate can be determined by measuring the agent or label associated with target and control T cells (e.g., by measuring the mean fluorescence intensity using flow cytometry) over a range of concentrations. The T-Cell-MP-epitope conjugate that binds with the highest affinity or avidity to the target T cell relative to the control T cell is understood to selectively bind to the target T cell.

### IX. GENETICALLY MODIFIED HOST CELLS

[0574] The present disclosure provides a genetically modified host cell, where the host cell is genetically modified with a nucleic acid (e.g., a nucleic acid encoding an unconjugated T-Cell-MP that may be operably linked to a promoter). Where such cells express T-Cell-MPs they may be utilized in methods of generating and selecting T-Cell-MPs as discussed in the preceding section.

[0575] Suitable host cells include eukaryotic cells, such as yeast cells, insect cells, and mammalian cells. In some cases, the host cell is a cell of a mammalian cell line. Suitable mammalian cell lines include human cell lines, non-human primate cell lines, rodent (e.g., mouse, rat) cell lines, and the like. Suitable mammalian cell lines include, but are not limited to, Hela cells (e.g., American Type Culture Collection (ATCC) No. CCL-2™), CHO cells (e.g., ATCC Nos. CRL-9618™, CCL-61™, CRL9096), 293 cells (e.g., ATCC No. CRL-1573™), Vero cells, NIH 3T3 cells (e.g., ATCC No. CRL-1658), Huh-7 cells, BHK cells (e.g., ATCC No. CCL-10™), PC12 cells (ATCC No. CRL-1721™), COS cells, COS-7 cells (ATCC No. CRL 1651), RAT1 cells, mouse L cells (ATCC No. CCLI.3), human embryonic kidney (HEK) cells (ATCC No. CRL 1573), HLHepG2 cells, and the like.

[0576] In some cases, the host cell is a mammalian cell that has been genetically modified such that it does not synthesize endogenous β2M and/or such that it does not synthesize endogenous MHC Class I heavy chains (MHC-H). In addition to the foregoing, host cells expressing formylglycine generating enzyme (FGE) activity are discussed above for use with T-Cell-MPs comprising a sulfatase motif, and such cells may advantageously be modified such that they do not express at least one, if not both, of the endogenous MHC β2M and MHC-H proteins.

### X. COMPOSITIONS AND FORMULATIONS

[0577] The present disclosure provides compositions and formulations, including pharmaceutical compositions and formulations. Compositions may comprise: a) a T-Cell-MP or T-Cell-MP-epitope conjugate and one or more pharmaceutically acceptable additives, e.g., nonionic surfactants, stabilizers, buffering agents, amino acids such as arginine and proline, etc., a variety of which are known in the art and therefore not discussed in detail herein. Pharmaceutically acceptable additives have been amply described in a variety of publications including but certainly not limited to publications such as, for example, “Remington: The Science and Practice of Pharmacy”, 19^{th} Ed. (1995), or latest edition, Mack Publishing Co; A. Gennaro (2000) “Remington: The Science and Practice of Pharmacy,” 20th edition, Lippincott, Williams, & Wilkins; Pharmaceutical Dosage Forms and Drug Delivery Systems (1999) H. C. Ansel et al., eds 7^{th} ed., Lippincott, Williams, & Wilkins; and Handbook of Pharmaceutical Excipients (2000) A. H. Kibbe et al., eds., 3^{rd} ed. Amer. Pharmaceutical Assoc., and updated editions of the foregoing.

[0578] The present disclosure also provides compositions and formulations, including pharmaceutical compositions, comprising a nucleic acid or a recombinant expression vector, where the nucleic acid or expression vector encodes all or part of a T-Cell-MP or its higher order complexes (e.g., one T-Cell-MP of a heterodimeric T-Cell-MP duplex).

[0579] Compositions will generally be in the form of aqueous or other solutions, but also may be in the form of powders, granules, tablets, pills, suppositories, capsules, suspensions, sprays, and the like. The composition may be formulated according to the various routes of administration described below.

[0580] Where a T-Cell-MP-epitope conjugate is administered as an injectable (e.g., subcutaneously, intraperitoneally, intramuscularly, and/or intravenously) directly into a tissue, a formulation can be provided as a ready-to-use dosage form, a non-aqueous form (e.g., a reconstitutable storage-stable powder), or an aqueous form, such as liquid composed of pharmaceutically acceptable carriers and excipients. T-Cell-MP formulations may also be provided so as to enhance serum half-life of the subject protein following administration. For example, the T-Cell-MP may be provided in a liposome formulation, prepared as a colloid, or other conventional techniques for extending serum half-life. A variety of methods are available for preparing liposomes, as described in, e.g., Szoka et al. 1980 Ann. Rev. Biophys. Bioeng. 9:467, U.S. Pat. Nos. 4,235,871, 4,501,728 and 4,837,028. The preparations may also be provided in controlled release or slow-release forms.

[0581] Other examples of formulations suitable for parenteral administration include those comprising sterile injection solutions, salts, anti-oxidants, bacteriostats, and/or solutes that render the formulation isotonic with the blood of the intended recipient. Such parenteral formulations may also include one or more independently selected suspending agents, solubilizers, thickening agents, stabilizers, and preservatives.

[0582] Formulations or pharmaceutical composition comprising a T-Cell-MP or T-Cell-MP-epitope conjugate can be present in a container, e.g., a sterile container, such as a syringe. The formulations can also be presented in unit-dose or multi-dose sealed containers, such as ampules and vials, any of which may be sterile. The formulation or pharmaceutical compositions may be stored in a sterile freeze-dried (lyophilized) condition requiring only the addition of the sterile liquid excipient, for example, water, for injections, immediately prior to use. Extemporaneous injection solutions and suspensions can be prepared from sterile solutions, powders, granules, and/or tablets that comprise the T-Cell-MP or T-Cell-MP-epitope conjugate. When a T-Cell-MP-epitope conjugate is administered intravenously, it may be administered neat or diluted with sterile saline prior to administration.

[0583] The concentration of a T-Cell-MP in a formulation can vary widely (e.g., from less than about 0.1%, usually at or at least about 2% to as much as 20% to 50% or more by weight) and will usually be selected primarily based on the particular components of the formulation. The concentration of a T-Cell-MP in an aqueous formulation can be, for example, from about 0.1 mg/ml to about 50 or more mg/mL, e.g., from about 1 mg/ml to about 20 mg/mL, from about 5 mg/mL to about 15 mg/mL, e.g., about 5 mg/mL, about 6 mg/mL, about 7 mg/mL, about 8 mg/mL, about 9 mg/mL, about 10 mg/mL, about 11 mg/mL, about 12 mg/mL, about 13 mg/mL, about 14 mg/mL, about 15 mg/mL.

[0584] In some cases, a T-Cell-MP is present in a liquid composition. Thus, the present disclosure provides compositions (e.g., liquid compositions, including pharmaceutical compositions) comprising a T-Cell-MP. The present disclosure also provides a composition comprising: a) a T-Cell-MP; and b) saline (e.g., 0.9% or about 0.9% NaCl). In some cases, the composition is buffered and/or sterile. The composition may be suitable for administration to a human subject, e.g., where the composition is of suitable pH (e.g., from about 6.5 to 7.8 such as pH 7.4+/−0.2 pH units), sterile and is substantially free of detectable pyrogens and/or other toxins, or any such detectable pyrogens and/or other toxins are below permissible limits. Thus, the present disclosure provides a composition comprising: a) a T-Cell-MP-epitope conjugate; and b) saline (e.g., 0.9% or about 0.9% NaCl), where the composition is sterile and is free of detectable pyrogens and/or other toxins, or any such detectable pyrogens and/or other toxins are below permissible limits, and is optionally buffered to a suitable pH (e.g., with a phosphate buffer).

### A. Compositions Comprising a Nucleic Acid or a Recombinant Expression Vector

[0585] The present disclosure provides compositions (e.g., pharmaceutical compositions) comprising a nucleic acid or a recombinant expression vector (see, e.g., supra) that comprise one or more nucleic acid sequences encoding any one or more T-Cell-MP polypeptide (or each of the polypeptides of a duplex T-Cell-MP multimer such as a heterodimer). As discussed above, pharmaceutically acceptable excipients are known in the art and have been amply described in a variety of publications.

### XI. METHODS OF MODULATING IMMUNE RESPONSES AND TREATING DISEASES AND DISORDERS

[0586] T-Cell-MP-epitope conjugates and higher order T-Cell-MP-epitope conjugate complexes (e.g., duplex T-Cell-MP-epitope conjugates) are useful for modulating an activity of a T cell, and directly or indirectly modulating the activity of other cells of the immune system. The present disclosure provides methods of modulating an activity of a T cell selective for a epitope (e.g., an “epitope-specific T cell” or an “epitope selective T cell”), the methods generally involving contacting a target T cell with a T-Cell-MP-epitope conjugate or a higher order complex of T-Cell-MP-epitope conjugates (e.g., duplex T-Cell-MP-epitope conjugates). A T-Cell-MP-coronavirus epitope conjugate or its higher order complexes may comprise one or more independently selected MODs that activate an epitope-specific T cell that recognizes a coronavirus-infected cell. In some cases, the activated T cells are cytotoxic T cells (e.g., CD8⁺ cells). Accordingly, the disclosure includes and provides for a method of preventing or inhibiting a coronavirus infection, prophylactically providing immune protection to lessen the effect and/or symptoms of a coronavirus infection, and/or treating an existing coronavirus infection, the method comprising administering to an individual in need thereof an effective amount of a T-Cell-MP-coronavirus epitope conjugate or a higher order complex thereof that comprises one or more independently selected MODs that activate an epitope-specific T cell that recognizes an epitope specific to a coronavirus antigen. An effective amount of such a T-Cell-MP-coronavirus epitope conjugate or its higher order complex may be an amount that primes and/or activates a CD8⁺ T cell specific to the conjugated epitope (e.g., generating and/or increasing the number of the CD8⁺ T cells and/or increasing proliferation related cell signaling, increasing release of their cytotoxic agents such as granzyme, and/or inducing or enhancing release of their cytokines such as interferon γ).

[0587] A T-Cell-MP-coronavirus epitope conjugate or its higher order complexes may also comprise one or more independently selected MODs that inhibit an epitope-specific T cell. Such T-Cell-MP-coronavirus epitope conjugates are useful for the treatment of individuals experiencing a reaction to a coronavirus that results in an excessive immune response to a coronavirus infection (e.g., excessive production of cytokines and/or cytotoxic responses by, for example, T cells) resulting in tissue damage. Accordingly, one or more T-Cell-MP-coronavirus epitope conjugates or their higher order complexes may be utilized to treat individuals experiencing a “cytokine storm” or respiratory distress in response to a coronavirus infection.

### A. Methods of Modulating T Cell Activity

[0588] The present disclosure provides a method of selectively modulating the activity of a T cell, the method comprising contacting or administering to a subject a T-Cell-MP-epitope conjugate or a higher order complex thereof, in some instances with a targeting sequence (e.g., CTP) or payload. Where the T-Cell-MP-epitope conjugate is a T-Cell-MP-coronavirus epitope conjugate the contacting can result in modulation of T cells specific for the conjugated epitope. Modulating the activity of a T cell can include, but is not limited to, one or more of: i) activating a cytotoxic (e.g., CD8⁺) T cell (e.g., to proliferate); ii) inducing cytotoxic activity of a cytotoxic (e.g., CD8⁺) T-cell; iii) inducing production and release of a cytotoxin (e.g., a perforin; a granzyme; a granulysin) by a cytotoxic (e.g., CD8⁺) T-cell; and iv) increasing the number of epitope-specific T cells. The contacting or administration may occur in vitro or in vivo where the molecule is administered to an animal, typically a human, but also to other animals that are susceptible to coronavirus infections (e.g., a mammal such as a rat, mouse, dog, cat, pig, horse, or primate). The contacting or administration may constitute all or part of a method of treating a disease or disorder as discussed further below. The T cells subject to modulation may be, for example, CD8+ T cells, a NK-T cells, and/or T reg cells. In some cases, the T cell is a CD8+ effector T cell. In some cases, the T cell is a CD8+ T-cell, CD4+CD8+ double positive T-cell, or a NK-T cell as described below under Treatment Methods. In some cases, the T cell is a CD8+ T cell as described below under Treatment Methods.

[0589] The present disclosure provides a method of selectively modulating the activity of an epitope-specific T cell. The method comprises contacting a T cell with a T-Cell-MP-coronavirus epitope conjugate (e.g., in duplex form) bearing a peptide presenting a coronavirus epitope recognized by the epitope-specific T-Cell. The contacting results in selectively modulating the activity of the epitope-specific T cell with the selectivity driven by the coronavirus epitope and the resultant activation driven, at least in part, by the MOD polypeptide sequence of the T-Cell-MP-epitope conjugate. Contacting T cells with T-Cell-MP-epitope conjugates can result in activation or suppression of T cells expressing a TCR specific for the conjugated epitope (an epitope-specific T cell) including induction or suppression of granule dependent and independent responses. Granule-independent responses include, but are not limited to, changes in the number or percentage of epitope-specific CD 8+ T cell (e.g., in a population of cells such as in blood, lymphatics, and/or in a target tissue), changes in the expression of Fas ligand (Fas-L, which can result in activation of caspases and target cell death through apoptosis), and cytokine/chemokine production (e.g., production and release of interferon gamma (IFN-v). Granule-dependent effector actions include the release of granzymes, perforin, and/or granulysin. Activation of epitope-specific CD8⁺ cytotoxic T cells (e.g., CD8⁺ cytotoxic effector T cells) can result in the targeted killing of, for example, infected cells by epitope-specific T cells that recognize the epitope presented by the T-Cell-MP-epitope conjugate (or higher order complex thereof (e.g., a duplex) through granule-dependent and/or independent responses.

[0590] Contacting a T-Cell-MP-epitope conjugate or higher order complex thereof (e.g., a duplex) bearing an activating MOD, where the T-Cell-MP is conjugated to an epitope recognize by the TCR of a target T cell (an epitope-specific T cell), may result in one or more of: i) proliferation of the epitope-specific T cell (e.g., CD8+ cytotoxic T cells); ii) epitope-specific induction cytotoxic activity; iii) release of one or more cytotoxic molecules (e.g., a perforin; a granzyme; a granulysin) by the epitope-specific cytotoxic (e.g., CD8+) T cell.

[0591] Where a T-Cell-MP-epitope conjugate includes a MOD that is an activating polypeptide, contacting the T cell with the T-Cell-MP-epitope conjugate activates the epitope-specific T-cell. In some instances, the epitope-specific T cell is a T cell that is specific for a coronavirus epitope (e.g., peptide, phosphopeptide, or glycopeptide epitopes such as those from a spike glycoprotein, nucleoprotein, membrane protein, replicase protein, non-structural protein (nsp) and the like), and contacting the epitope-specific T cell with the T-Cell-MP-epitope conjugate increases cytotoxic activity of the T cell toward a coronavirus-infected cell. In some instances, the epitope-specific T cell is a T cell that is specific for a coronavirus epitope, and contacting the epitope-specific T cell with the T-Cell-MP-epitope conjugate increases the number of the epitope-specific T-cells.

[0592] In some instances, the epitope-specific T cell is a T cell that is specific for an epitope present on a coronavirus-infected cell and contacting the epitope-specific T cell with the T-Cell-MP-epitope conjugate increases cytotoxic activity of the T cell toward the coronavirus-infected cell. In some instances, the epitope-specific T cell is a T cell that is specific for an epitope present on a coronavirus-infected cell and contacting the epitope-specific T cell with the T-Cell-MP-epitope conjugate increases the number of the epitope-specific T-cells.

[0593] In contrast, contacting a T-Cell-MP-coronavirus epitope conjugate or higher order complex thereof (e.g., a duplex) bearing an inhibitory MOD, with a T cell having a TCR that recognizes the conjugated peptide presenting a coronavirus epitope may result in one or more of: i) suppression of proliferation and/or reduction the number of the epitope-specific T cells (e.g., CD8+ cytotoxic T cells); ii) epitope-specific suppression of a cytotoxic activity; iii) suppression the production and/or release of one or more cytotoxic molecules (e.g., a perforin; a granzyme; a granulysin) by the epitope-specific cytotoxic (e.g., CD8+) T cell. Contacting a T-Cell-MP-epitope conjugate or higher order complex thereof (e.g., a duplex) conjugated to an epitope recognize by TCR of a T cell (an epitope-specific T cell) and bearing an inhibitory MOD may also result in one or more of: i) epitope-specific inhibition autoreactive T cell; or ii) induction of epitope-specific CD8+T regulatory cells; and the like.

[0594] The present disclosure provides a method of modulating an immune response in an individual, the method comprising administering to the individual one or more doses of an effective amount of a T-Cell-MP-coronavirus epitope conjugate. As noted above, administering the T-Cell-MP-coronavirus epitope conjugate, may induce a coronavirus epitope-specific T cell response resulting in modulating the proliferation activity of a first T cell that displays both: i) a TCR specific for the epitope present in the T-Cell-MP; and ii) a Co-MOD that binds to the MOD present in the T-Cell-MP-epitope conjugate; and also induces an epitope non-specific T cell response by modulating the proliferation activity of a second T cell that displays: i) a TCR specific for an epitope other than the epitope present in the T-Cell-MP; and ii) a Co-MOD that binds to the MOD present in the T-Cell-MP. The ratio of the epitope-specific T cell response to the epitope-non-specific T cell response following administration of the T-Cell-MP-coronavirus epitope conjugate (e.g., when measured as the ratio of the increase of the number of epitope-specific T cells to the number of epitope non-specific T cells in the blood) may be at least 2:1 to at least 100:1. For example, following administration, the ratio of the proliferation of epitope-specific T cell response to the proliferation of epitope-non-specific T cell may be at least 5:1, at least 10:1, at least 25:1, at least 50:1, or at least 100:1. The increase of the number of epitope-specific T cells to the increase in the number of epitope non-specific T cells, e.g. in the blood of a coronavirus-infected patient, can be readily determined by known methods.

[0595] Increasing cytotoxic T cell response to a coronavirus-infected cell by administering a T-Cell-MP-epitope conjugate may occur in vivo where the T-Cell-MP-epitope conjugate is administered to a subject (e.g., intravenously, subcutaneously, or intramuscularly). The in vivo modulation may occur in a human subject or patient.

[0596] The present disclosure also provides a method of detecting, in a mixed population of cells (e.g., a mixed population of T cells) obtained from an individual, the presence of a target T cell that binds a coronavirus epitope of interest, the method comprising: a) contacting in vitro the mixed population of cells (e.g., mixed population of T cells) with a T-Cell-MP-coronavirus epitope conjugate; and b) detecting activation and/or proliferation of T cells in response to said contacting, wherein activated and/or proliferated T cells indicates the presence of the target T cell.

[0597] The present disclosure provides a method of increasing the proliferation (e.g., proliferation rate) and/or the total number of CD 8+ effector T cells directed against a coronavirus epitope in an animal or tissue that are specific to an epitope presented by a T-Cell-MP-epitope conjugate or higher order complex thereof (e.g., a duplex) bearing an activating MOD such as IL-2 or an IL-2 variant as described herein. A method of increasing T cell proliferation or numbers comprises contacting (e.g., in vitro or in vivo) T cells with a T-Cell-MP-epitope conjugate. Contacting may occur, for example, by administering to a subject in one or more doses a T-Cell-MP-epitope conjugate. The contacting or administering may increase the number of CD8+ effector T cells having a TCR capable of binding the epitope present in the T-Cell-MP-coronavirus-epitope conjugate relative to the number (e.g., total number or percentage) of T cells present in a tissue (e.g., in a population of cells such as in blood, lymphatics, and/or in a target tissue such as a tumor). For example, the absolute or relative number of CD 8+ effector T cells specific to the coronavirus epitope presented by a T-Cell-MP-epitope conjugate or a higher order complex (e.g., duplex) can be increased by at least 5%, at least 10%, at least 20%, at least 30%, at least 40%, at least 50%, least 75%, at least 100%, at least 2-fold, at least 2.5-fold, at least 5-fold, at least 10-fold, or more than 10-fold following one or more contacts with doses or administrations of the T-Cell-MP-epitope conjugate or a higher order complex thereof. The increase may be calculated relative the CD8+ T cell numbers present in the tissue prior to the contacting or administrations, or relative to the population of T cells present in the tissue (e.g., a sample of blood or tissue) that has not been contacted with the T-Cell-MP-epitope conjugate or its higher order complex. The increase may also be calculated relative the relative increase in epitope-specific CD8+ T cell numbers present after an otherwise identical population of T cells have been contacted with an otherwise identical T-Cell-MP conjugated to a control epitope not recognized by the target T cells, or by contact with the unconjugated T-Cell-MP. For example, within a tumor the number of CD8+ T cells specific for the epitope presented by the T-Cell-MP-epitope conjugate may increase in the absolute number per weight or volume of tissue (e.g., the number of epitope-specific T cells in histological sections or in disrupted tumor samples determined by flow cytometry using tetramers specific for the T cells). The increase in CD8+ T cells specific for the epitope presented by the T-Cell-MP-epitope conjugate may also increase as the fraction (e.g., percentage) of total CD8+ T cells present in the histological sections or tumor samples (e.g., accessed by tetramer staining using flow cytometry).

[0598] The present disclosure provides a method of increasing granule-dependent and/or granule-independent responses of epitope-specific CD 8+ T cell comprising contacting or administering (e.g., in vitro or in vivo) T cells with a T-Cell-MP-epitope conjugate or a higher order complex thereof, (e.g., with a CD80, and/or CD86 MOD). The contacting or administering may result in, for example, an increased expression of Fas ligand expression, cytokines/chemokines (e.g., IL-2, IL-4, and/or IL-5), release of interferons (e.g., IFN-γ), release of granzymes, release of perforin, and/or release of granulysin. For example, contacting a CD 8+ effector cell with a T-Cell-MP-epitope conjugate or complex thereof (e.g., a duplex) that presents a coronavirus epitope may increase one or more of Fas ligand expression, interferon gamma (IFN-γ) release, granzyme release, perforin release, and/or granulysin release by a T cell bearing a TCR that is specific to the epitope. The increase may be at least 5%, at least 10%, at least 20%, at least 30%, at least 40%, at least 50%, least 75%, at least 100%, at least 2-fold, at least 2.5-fold, at least 5-fold, at least 10-fold, or more than 10-fold. The increase may be calculated relative the level of expression or release prior to the contacting or administrations, or relative to the population of T cells present in a sample (e.g., a sample of blood or tissue) that has not been contacted with the T-Cell-MP-epitope conjugate or a complex thereof. The increase may also be calculated relative the level of expression or release by an otherwise identical population of T cells that have been contacted with an otherwise identical T-Cell-MP conjugated to a control epitope not recognized by the target T cells or by contact with the unconjugated T-Cell-MP.

### B. Methods of Selectively Delivering a MOD (Costimulatory Polypeptide)

[0599] The present disclosure provides a method of delivering one or more independently selected MODs and/or a reduced-affinity variant of naturally occurring MODs (such as a variant disclosed herein) to a selected T cell or a selected T cell population, e.g., in a manner such that T cells bearing a TCR specific for a given coronavirus epitope are targeted. The present disclosure provides a method of delivering a MOD, or a variant (e.g., a reduced-affinity variant) of a naturally occurring MOD disclosed herein, selectively to a target T cell bearing a TCR specific for the coronavirus epitope present in a T-Cell-MP-epitope conjugate. The method comprises contacting a population of T-cells with a T-Cell-MP-coronavirus epitope conjugate. The population of T-cells can be a mixed population that comprises: i) the target T-cell; and ii) non-target T-cells that are not specific for the epitope (e.g., T-cells that are specific for an epitope other than the epitope to which the epitope-specific T cell binds). The epitope-specific T cell is specific for the coronavirus epitope-presented by the T-Cell-MP-coronavirus epitope conjugate and binds to the peptide-HLA complex (or peptide-MHC complex) provided by the T-Cell-MP-coronavirus epitope conjugate. Accordingly, contacting the population of T-cells with the T-Cell-MP-epitope conjugate delivers the costimulatory polypeptide (e.g., a wild-type MOD or a variant MOD (e.g., a reduced-affinity variant of the wild-type MOD described herein) selectively to the T-cell(s) that are specific for the epitope present in the T-Cell-MP-epitope conjugate. In some cases, the population of T cells is in vitro. In some cases, the population of T cells is in vivo in an individual. In some cases, the method comprises administering the T-Cell-MP-epitope conjugate to the individual. In some case, the T cell is a cytotoxic T cell. In some cases, the mixed population of T cells is an in vitro population of mixed T cells obtained from an individual, and the contacting step results in activation and/or proliferation of the target T cell(s), generating a population of activated and/or proliferated target T cells; in some of these instances, the method further comprises administering the population of activated and/or proliferated target T cells to the individual.

[0600] In some cases, the population of T cells to which the MOD(s) and/or variant MOD(s) is/are delivered is present in vitro, and a biological response (e.g., T cell activation, expansion, and/or phenotypic differentiation) of the target T cell population to the T-Cell-MP-epitope conjugate or a higher order complex thereof (e.g., a duplex) is elicited in the context of an in vitro setting. For example, a mixed population of T cells can be obtained from an individual and can be contacted with the T-Cell-MP-epitope conjugate or a higher order complex thereof (e.g., a duplex) in vitro. Such contacting can comprise single or multiple exposures of the population of T cells to one or more doses of the T-Cell-MP-epitope conjugate. In some cases, said contacting results in selectively binding/activating and/or expanding target T cells within the population of T cells, and results in generation of a population of activated and/or expanded target T cells. As an example, a mixed population of T cells can be peripheral blood mononuclear cells (PBMCs) obtained by phlebotomy and standard enrichment techniques before being exposed to 0.1-1000 nM (e.g., 0.1 to 10 nM or 10 nm to 1,000 nm) of a T-Cell-MP-epitope conjugate or a higher order complex thereof (e.g., a duplex) under conditions suitable for lymphocyte culture. At time points before, during, and after exposure of the mixed T cell population at a defined dose and schedule, the abundance of target T cells in the in vitro culture can be monitored by specific peptide-MHC multimers, phenotypic markers, and/or functional activity (e.g. cytokine ELISpot assays). In some cases, upon achieving an optimal abundance and/or phenotype of antigen specific cells in vitro, all or a portion of the population of activated and/or expanded target T cells is administered to an individual (e.g., the individual from whom the mixed population of T cells was obtained as a treatment for a disease of disorder).

[0601] By way of example, a mixed population of T cells is obtained from an individual and is contacted with a T-Cell-MP-epitope conjugate or a higher order complex thereof (e.g., a duplex) in vitro. Such contacting, which can comprise single or multiple exposures of the T cells to one or more doses and/or exposures in the context of in vitro cell culture, can be used to determine whether the mixed population of T cells includes T cells that are specific for the epitope presented by the T-Cell-MP-epitope conjugate or higher order complex. The presence of T cells that are specific for the epitope can be determined by assaying a sample comprising a mixed population of T cells, which population of T cells comprises T cells that are not specific for the epitope (non-target T cells) and may comprise T cells that are specific for the epitope (target T cells). Known assays can be used to detect activation and/or proliferation of the target T cells, thereby providing an in vitro assay that can determine whether a particular T-Cell-MP-epitope conjugate or a higher order complex thereof possesses an epitope that binds to T cells present in the individual, and thus whether the epitope conjugate has potential use as a therapeutic composition for that individual. Suitable known assays for detection of activation and/or proliferation of target T cells include, e.g., flow cytometric characterization of T cell phenotype and/or antigen specificity and/or proliferation. Such assays maybe used to detect the presence of epitope-specific T cells, e.g., as a companion diagnostic. Additional assays (e.g. effector cytokine ELISpot assays) and/or appropriate controls (e.g. antigen-specific and antigen-nonspecific multimeric peptide-HLA staining reagents) to determine whether the T-Cell-MP-epitope conjugate or a higher order complex thereof (e.g., a duplex) is selectively binding, modulating (activating or inhibiting), and/or expanding the target T cells may also be employed. Thus, for example, the present disclosure provides a method of detecting, in a mixed population of T cells obtained from an individual, the presence of a target T cell that binds a coronavirus epitope of interest, the method comprising: a) contacting in vitro the mixed population of T cells with a T-Cell-MP-coronavirus epitope conjugate or a higher order complex thereof (e.g., a duplex); and b) detecting modulation (activation or inhibition) and/or proliferation of T cells in response to said contacting, wherein modulation of and/or proliferation of T cells indicates the presence of the target T cell. Alternatively, or in addition, if activation and/or expansion (proliferation) of the desired T cell population is obtained using a T-Cell-MP-coronavirus epitope conjugate or a higher order complex thereof (e.g., a duplex), then all or a portion of the population of T cells comprising the activated/expanded T cells can be administered back to the individual as a therapy for the prophylaxis/treatment of a coronavirus infection.

[0602] In some instances, the population of T cells is in vivo in an individual. In such instances, a method for selectively delivering one or more MOD polypeptides (e.g., IL-2 or PD-L1 or a reduced-affinity IL-2 or PD-L1) to an epitope-specific T cell comprises administering the T-Cell-MP-epitope conjugate or a higher order complex thereof (e.g., as a duplex) to the individual. The T-Cell-MP may comprise one or more (e.g., two or more) targeting sequences that redirect the T-Cell-MP to a specified cell or tissue type. In some instances, at least one of the targeting sequences is specific for coronavirus antigen (e.g., expressed on an infected cell surface) and the epitope present in the T-Cell-MP-epitope conjugate is not an epitope of the same (identical) coronavirus antigen. Such molecules may find use in, for example, redirecting CD8+ T cells of an individual immunized against a coronavirus infection (e.g., using an antigen that presents the covalently conjugated epitope in the T-cell-MP-epitope conjugate) to express effector T cell functions against cells of the immunized individual that are infected with a different strain of the coronavirus.

[0603] In some instances, the epitope-specific T cell to which one or more MOD polypeptide sequences (e.g., a wild-type or variant MODs such as reduced-affinity variants of IL-2 or PD-L1) is/are being selectively delivered is a target T cell that recognizes the epitope presented by the T-Cell-MP-epitope conjugate (e.g., T-Cell-MP-coronavirus epitope conjugate).

### C. Methods of Treatment

[0604] The present disclosure provides a method of treating or preventing a coronavirus infection in an individual comprising selectively modulating the activity of a coronavirus epitope-specific T cell in an individual. The method comprises administering to the individual an amount of a T-Cell-MP-epitope conjugate (e.g., a T-Cell-MP-coronavirus epitope conjugate). The coronavirus infection may be a primary infection, secondary infection, or may be associated with Long COVID. Such methods of treatment may function to increase the number of T cells specific to the epitope presented by the T-Cell-MP-coronavirus epitope conjugate or its higher order complexes (e.g., duplexes) when MODs that stimulate T cell proliferation are present in the T-Cell-MP-epitope conjugate. When the proliferated T cells are, for example, CD8+ effector T cells or NK T cells the method results in the killing of cells displaying the epitope conjugated to the T-Cell-MP. Also provided are T-Cell-MP-coronavirus epitope conjugates and redirected T-Cell-MP-epitope conjugates for use in a method of treatment of a human or non-human mammal.

[0605] A treatment method, which may be done prophylactically, may comprise administering to an individual in need thereof an effective amount of one or more T-Cell-MP-coronavirus epitope conjugates or higher order complexes of such proteins (e.g., duplexes). Where treatment is conducted prophylactically, it may prevent in the treated subject a coronavirus infection or at least prevent one or more symptoms or complications of an infection if it occurs such as those symptoms requiring hospitalization, relative to the rate of infection observed in a control population. Conditions that can be treated (or prevented in the case of prophylactic administration) include alpha-, beta-, gamma-, delta- and omicron-coronavirus infections. Coronavirus infections that can be treated include infections by Bat-SL-CoV, SARS-CoV, SARS-CoV-2 (Covid-19), or MERS-CoV. Coronavirus infections that can be treated also include infections by a SARS-CoV, SARS-CoV-2, or MERS-CoV. A coronavirus infection that can be treated may be a SARS-CoV-2 (Covid-19) infection. Treatment with one or more T-Cell-MP-coronavirus epitope conjugates may be used to boost the immunity of a previously immunized or previously infected individual.

[0606] The symptoms of SARS-CoV-2 vary, but individuals generally experience one or more of: fever or chills, cough, shortness of breath or difficulty breathing, fatigue, muscle or body aches, headache, new loss of taste or smell, sore throat, congestion or runny nose, nausea or vomiting, or diarrhea. See, e.g., Management of Patients with Confirmed Coronavirus Disease (COVID-19)|CDC at: www.cdc.gov/coronavirus/2019-ncov/hcp/clinical-guidance-management-patients.html.

[0607] The most common complications of severe SARS-CoV-2 include pneumonia, hypoxemic respiratory failure/ARDS, sepsis and septic shock, cardiomyopathy and arrhythmia, and acute kidney injury. Id. “Some patients with COVID-19 may have signs of a hypercoagulable state and be at increased risk for venous and arterial thrombosis of large and small vessels.” Id. Symptoms commonly observed among patients hospitalized with SARS-CoV-2 coagulopathies include: mild thrombocytopenia, increased D-dimer levels, increased fibrin degradation products, and prolonged prothrombin time; with elevated D-dimer levels strongly associated with greater risk of mortality. Id. Hospitalized patients may also experience thrombotic complications, including deep venous thrombosis, pulmonary embolism, microvascular thrombosis of the toes (“COVID toes”), clotting of intra-vascular catheters, myocardial injury with ST-segment elevation, and large vessel strokes. Id.

[0608] The present disclosure provides a method of treating a patient infected by a coronavirus comprising administering to the patient diagnosed to have a coronavirus infection an effective amount of one or more T-Cell-MP-coronavirus epitope conjugates or higher order complexes. Treatment may reduce one or more of: symptoms of the infection, the amount of time until the subject is free of detectable virus, morbidity, disease severity (severity of a symptom or complication), and/or mortality due to coronavirus infection relative to the average for a control population (e.g., an untreated patient group infected by a coronavirus matched for age and sex). The coronavirus may be a SARS-CoV2 coronavirus.

[0609] A control population is a population of patients or subjects that did not receive a treatment with any T-Cell-MP-coronavirus epitope conjugate or higher order complex of such protein or other treatments for a coronavirus infection. The control population may be matched by i) age, sex, immune disease, and country of residence. A control population may also be matched by (ii) age, weight, sex, immune disease, country of residence, and smoking status. A control population may also be matched by (iii) age, weight, sex, immune disease status including HIV infection status, country of residence, cancer, cerebrovascular disease, kidney disease, chronic obstructive pulmonary disease, (COPD), diabetes, coronary disease (heart failure, coronary artery disease, or cardiomyopathies), smoking, pregnancy, and/or asthma. See, e.g., www.cdc.gov/coronavirus/2019-ncov/need-extra-precautions/people-with-medical-conditions.html. Additional factors deemed relevant to coronavirus disease, its symptoms, progression, and/or mortality may be added to those factors used to select a control population. Where necessary for valid comparison, such as for the amount of viral shedding, the control population may be a coronavirus-infected control population, which may be further selected for the specific virus and/or length of time since the individuals in the population were initially infected.

[0610] Because the T-Cell-MP-coronavirus epitope conjugates and higher order complexes thereof induce T cell responses that can result in killing virus infected cells, they can result in a lower viral load in treated patients or subjects, including those treated prophylactically. The lower viral load results in lower amounts of virus that can be shed and or transmitted by infected individuals. Accordingly, the present disclosure provides a method of reducing viral load, shedding, and/or transmission of coronavirus by infected individuals relative to the viral load, shedding, and/or transmission of coronavirus by a control population, the method comprising administering to an individual in need thereof an effective amount of one or more T-Cell-MP-coronavirus epitope conjugates or higher order complex of such protein. The present disclosure provides a method of reducing the transmission of coronavirus comprising administering to an individual diagnosed to have coronavirus infection or suspected of or at risk of exposure to coronavirus in need thereof an effective amount of one or more T-Cell-MP-coronavirus epitope conjugates or higher order complex of such proteins. The coronavirus may be SARS-CoV2 coronavirus.

[0611] The present disclosure thus provides a method of reducing the viral load of coronavirus in an individual comprising administering to an individual positive for coronavirus infection an effective amount of a T-Cell-MP-epitope conjugate. In particular embodiments, the coronavirus is a SARS-CoV2 coronavirus.

[0612] The present disclosure provides a method of killing coronavirus-infected cells in an individual comprising administering to an individual positive for coronavirus infection an effective amount of a T-Cell-MP-coronavirus epitope conjugate. The coronavirus may be a SARS-CoV2 coronavirus. In some cases, the T-Cell-MP-coronavirus epitope conjugate comprises a MOD (e.g., IL-2 or an IL-2 variant) that activates an epitope-specific T cell that recognizes the coronavirus epitope. In some cases, the T cells are cytotoxic T-cells (CD8+ cells) and the T-Cell-MP-coronavirus epitope conjugate increases the activity of the T cell specific for a coronavirus-infected cell. Activation of CD8+ T cells may include increasing: proliferation of the T cells; the production of cytokines, chemokines, and/or cytotoxic materials (e.g., granulysin); the release of cytokines such as interferon γ; and/or the release of cytotoxic materials (e.g., perforin, granzyme, or granulysin).

[0613] In some cases, a T-Cell-MP-coronavirus epitope conjugate reduces proliferation and/or activity of an epitope restricted regulatory T cell or Treg (e.g., CD8⁺ Tregs which are FoxP3⁺, CD8⁺ T cells). In some cases, e.g., where a T-Cell-MP-epitope conjugate comprises an inhibitory MOD (e.g., PD-L1, FasL, and the like), the T-Cell-MP-epitope conjugate reduces the proliferation and/or activity of a Treg and may result in apoptosis of the T reg.

[0614] T-Cell-MP-coronavirus epitope conjugates may comprise a viral lipopeptide, glycopeptide or phosphopeptide epitope, and may be administered to an individual in need thereof to treat a coronavirus infection in the individual, where the infectious agent expresses the epitope present in the T-Cell-MP-coronavirus epitope conjugate. Accordingly, the present disclosure provides a method of treating an infection in an individual, the method comprising administering to the individual an effective amount of a coronavirus lipopeptide, glycopeptide or phosphopeptide epitope containing T-Cell-MP-coronavirus epitope conjugate. Such treatments may be conducted prophylactically, to treat an active infection, or to boost the immunity of a previously infected or immunized individual.

[0615] In some instances, the epitope-specific T cell is a T cell that is specific for an epitope present on a coronavirus-infected cell, and contacting the epitope-specific T cell with the T-Cell-MP-coronavirus epitope conjugate (e.g., in vitro or in vivo by administration to a patient or subject) increases cytotoxic activity of the T cell toward the coronavirus-infected cell. In some instances, the epitope-specific T cell is a T cell that is specific for an epitope present on a coronavirus-infected cell, and contacting the epitope-specific T cell (e.g., in vitro or in vivo by administration to a patient or subject) with the T-Cell-MP-coronavirus epitope conjugate increases the number of epitope-specific T-cells. Accordingly, the present disclosure provides a method of treating a coronavirus infection in an individual, the method comprising administering to the individual an effective amount of a T-Cell-MP-coronavirus epitope conjugate, where the T-Cell-MP-coronavirus epitope conjugate comprises a stimulatory MOD.

[0616] The present disclosure provides a method of selectively modulating the activity of one or more coronavirus epitope-specific T-cell(s) in an individual (e.g., patient or subject), the method comprising administering to the individual an effective amount of one or more T-Cell-MP-coronavirus epitope conjugates that selectively modulate the activity of those one or more coronavirus epitope-specific T-cell(s) in the individual. As selectively modulating the activity of one or more coronavirus epitope-specific T-cell(s) can treat a disease or disorder in the individual, the present disclosure provides a treatment method comprising administering to an individual (e.g., an individual in need thereof) an effective amount of a T-Cell-MP-coronavirus epitope conjugate is sufficient to modulate the activity of one or more epitope-specific T cell(s), e.g., cause activation of such T-cell(s). The one or more T cell(s) may be specific for an epitope of a Bat-SL-CoV, SARS-CoV, SARS-CoV-2 (Covid-19), or MERS-CoV, and accordingly the method may treat a coronavirus infection by any one or more of those viruses. The one or more T cell(s) may be specific for SARS-CoV, SARS-CoV-2, or MERS-CoV, and accordingly, the treatment specific for infections by any one or more of those viruses. The one or more T cell(s) maybe specific for SARS-CoV or SARS-CoV-2, or MERS-CoV, and accordingly, the treatment specific for infections by either one or the other of those viruses. The one or more T cell(s) may be specific for SARS-CoV-2, and accordingly, the treatment specific for infections by that virus.

[0617] Administering an effective amount of T-Cell-MP-coronavirus epitope conjugates induces a coronavirus epitope-specific T cell response, and may also induce an epitope-non-specific T cell response. The ratio of the coronavirus epitope-specific T cell response to the epitope-non-specific T cell response may be at least 2:1. In some cases, the ratio of the coronavirus epitope-specific T cell response to the epitope-non-specific T cell response is at least 5:1. In some cases, the ratio of the coronavirus epitope-specific T cell response to the epitope-non-specific T cell response is at least 10:1. In some cases, the ratio of the coronavirus epitope-specific T cell response to the epitope-non-specific T cell response is at least 25:1. In some cases, the ratio of the coronavirus epitope-specific T cell response to the epitope-non-specific T cell response is at least 50:1. In some cases, the ratio of the coronavirus epitope-specific T cell response to the epitope-non-specific T cell response is at least 100:1. In some cases, the individual is a human.

[0618] An effective amount of a T-Cell-MP-coronavirus epitope conjugate or higher order complex of such protein may be an amount that, when administered in one or more doses to an individual in need thereof, reduces the number of coronavirus-infected cells in the individual. For example, in some cases, an “effective amount” of a T-Cell-MP-coronavirus epitope conjugate or a higher order complex of such protein, is an amount that, when administered in one or more doses to an individual in need thereof, reduces the number of coronavirus-infected cells in the individual by at least 10%, at least 15%, at least 20%, at least 25%, at least 30%, at least 40%, at least 50%, at least 60%, at least 70%, at least 80%, at least 90%, or at least 95%, compared to the number of coronavirus-infected cells in the individual prior to administration. In some cases, an effective amount of any of those proteins or their higher order complexes is an amount that, when administered in one or more doses to an individual in need thereof, reduces the number of coronavirus-infected cells in the individual to undetectable levels.

[0619] An “effective amount” of any one or more T-Cell-MP-coronavirus epitope conjugates or higher order complex of such proteins, including such proteins that also comprise a coronavirus targeting sequence, may be an amount that, when administered in one or more doses to an individual in need thereof, decreases one or more effects or symptoms of the coronavirus infection, and/or increases survival time of the individual.

[0620] An “effective amount” of any one or more redirected T-Cell-MP-coronavirus epitope conjugates, or higher order complexes of such proteins that comprise a CTP, may be an amount that, when administered in one or more doses to an individual in need thereof, decreases the number of cancerous cells (e.g., reduces the size or volume of the cancer), decreases the rate of growth of the cancer, decreases one or more effects or symptoms of the targeted cancer, and/or increases survival time of the individual.

[0621] In some cases, because T-Cell-MP-epitope conjugates also are able to prime naïve T cells, the pharmaceutical compositions of this disclosure comprising a T-Cell-MP-coronavirus epitope conjugate or a higher order complex thereof (e.g., a duplex) also may be used to prophylactically treat persons who are not infected but at risk of infection. For example, the pharmaceutical compositions can be administered to cause a human or non-human subject to prime and activate coronavirus epitope-specific T cells and/or develop memory T cells (see e.g., the peptide epitopes set forth in Table 3a) that will be therapeutically useful in the event of a coronavirus (e.g., SARS-CoV-2) infection. Accordingly, in some cases, an effective amount of a pharmaceutical composition comprising a T-Cell-MP-epitope conjugate or a higher order complex thereof (e.g., a duplex) is an amount that, when administered in one or more doses to individuals in a population who do not have an infection and are at risk of infection, and/or to individuals who are at greater risk of severe illness from infection by a coronavirus (e.g., SARs-CoV-2) than the general population, causes a human or non-human to prime and activate epitope-specific T cells and/or develop memory T cells that will be therapeutically useful (directed against coronavirus-infected cells or tissues) in the event of a coronavirus (e.g., a SARS-CoV-2) infection. Individuals who are at greater risk of severe illness from coronavirus (e.g., SARs-CoV-2) include, but are not limited to those having one or more of the following conditions: cancer, chronic kidney disease, chronic lung diseases (e.g., COPD, asthma, interstitial lung disease, cystic fibrosis, and pulmonary hypertension), dementia or neurological conditions, diabetes (types 1 or 2), Down syndrome, heart conditions, (e.g., heart failure, coronary artery disease, cardiomyopathies or hypertension), HIV infection, compromised immune system(s), liver disease, overweight, pregnancy, sickle cell disease or thalassemia, smoking (former or current), solid organ or blood stem cell transplant, stroke or cerebrovascular disease affecting blood flow to the brain, and/or substance use disorders. See e.g., CDC guidelines at:
[0622] www.cdc.gov/coronavirus/2019-ncov/need-extra-precautions/people-with-medical-conditions.html.

[0623] As noted above, in carrying out a subject treatment method, one or more T-Cell-MP-coronavirus epitope conjugates, redirected T-Cell-MP-epitope conjugates, or higher order complexes of either of those proteins may be administered to a patient or subject (e.g., individual in need thereof) either unformulated or formulated as a pharmaceutical composition.

[0624] The present disclosure also includes and provides for methods of redirecting a T cell (e.g., a CD8⁺ effector T cell) directed to a specified epitope (e.g., a specified epitope of a coronavirus such as SARS-CoV-2) toward a cancerous cell or tissue. If the patient does not have (or might not have) sufficient T cells directed to the specified epitope the method may comprise an initial step of immunizing the patient to be treated with a vaccine (e.g., a SARS-CoV-2 vaccine such as the Pfizer, Moderna or J&J vaccine) that induces or expands the number of T cells specific to the specified epitope (see FIG. 18 top section). A patient, having sufficient T cells specific to the epitope, is treated with a redirected T-Cell-MP conjugated to the specified epitope that further comprises one or more (e.g., two or more) targeting sequences directed to proteins associated with a cancer (e.g., CTPs) and one or more MODs. See FIG. 18 middle portion “Treatment with T-Cell-MP-epitope conjugate”. By way of example, the T-Cell-MP conjugated to the specified epitope may comprise cancer targeting sequences as discussed above. The T-Cell-MP-epitope conjugate bearing such a targeting sequence will be localized on a cancerous cell or tissue. Localization of the redirected T-Cell-MP-conjugated to the specified epitope causes the localization of T-cells specific to the specified epitope, while the signal from the MOD in combination with the signal from the TCR engaged by the specified epitope presented by the T-Cell-MP-epitope conjugate, directs the T cells response (e.g., cytotoxic attack of the target cell as shown in the lower section of FIG. 18). The overall process permits the actions of a T cell to be redirected from cells or tissues expressing the specified epitope to cells or tissues that express a molecule the targeting sequence(s) recognize. It may be advantageous to use heteromeric T-Cell-MPs (e.g., duplexes that are heterodimers) having more than one targeting sequence directed against different molecules presented by cancerous cells or tissues (e.g., CTP1 and CTP2 as in FIG. 18) to prevent malignant cells from escaping from the treatment by loss or mutation of a single target. Benign tumors, precancerous cells or tissues, tissues, and coronavirus infected cells may also be targeted with T-Cell-MPs comprising two or more targeting sequences.

[0625] Redirected T-Cell-MP-coronavirus epitope conjugates in which the peptide presenting a coronavirus epitope is a SARS-CoV-2 epitope offer several therapeutic advantages. For example, because a large portion of the world's population has been infected and/or vaccinated, many persons already will have T cells directed to SARS-CoV-2 proteins. Further, HLA loss is one of the mechanisms by which cancers can evade the immune system. Redirected T-Cell-MP-epitope conjugates, which do not rely on HLA, thus can attack such cancers. Another mechanism by which cancers evade the immune system is by mutation that eliminates presentation of an antigen. Redirected T-Cell-MP-epitope conjugates that present more than one targeting sequence (see, e.g., FIG. 18) can avoid the cancer from escaping immune surveillance and treatment because the cancer will have to obtain at least two different mutations that affect binding by the different targeting sequences. Alternatively, the patient can be administered two different Redirected T-Cell-MP-epitope conjugates, each of which has a targeting sequence directed to a different cancer antigen. Redirected T-Cell-MP-epitope conjugate therapy can be tailored to such individuals by prescreening them to confirm they have T cells that recognize the epitope conjugated to and presented by the T-Cell-MP MHC (HLA) portion of the molecule and/or by confirming that the targeting portion recognizes cancer cells in the individual to be treated.

[0626] An effective amount of a redirected T-Cell-MP-coronavirus-epitope conjugate or higher order complex of such protein may be an amount that, when administered in one or more doses to an individual in need thereof, reduces the number of cancerous cells expressing the antigen targeted by at least one CTP of the redirected T-Cell-MP-coronavirus-epitope conjugate or higher order complex thereof, as measured by the size or volume of the tumor in the case of a solid tumor, in the individual. For example, in some cases, an “effective amount” of a redirected T-Cell-MP-coronavirus-epitope conjugate or a higher order complex of such protein, is an amount that, when administered in one or more doses to an individual in need thereof, reduces the number of those cancerous (i.e., cancer cells expressing the target of the CTP) in the individual by at least 10%, at least 15%, at least 20%, at least 25%, at least 30%, at least 40%, at least 50%, at least 60%, at least 70%, at least 80%, at least 90%, or at least 95%, compared to the number of cancerous cells expressing the target of the CTP in the individual prior to the administration. The reduction may occur, for example, in two days, three days, four days, five days, six days, one week, two weeks, three weeks, one month, two months or more). In some cases, an effective amount of any of those proteins or their higher order complexes is an amount that, when administered in one or more doses to an individual in need thereof, reduces the number of cancer cells expressing the target of the CTP in the individual to undetectable levels.

[0627] An effective amount of a redirected T-Cell-MP-coronavirus-epitope conjugate or higher order complex of such protein may be an amount that, when administered in one or more doses to an individual in need thereof, reduces the amount of circulating tumor DNA (ctDNA) in the blood of a patient, For example, an “effective amount” of a redirected T-Cell-MP-coronavirus-epitope conjugate or a higher order complex of such protein, is an amount that, when administered in one or more doses to an individual in need thereof, reduces the level of ctDNA in the blood individual by at least 10%, at least 15%, at least 20%, at least 25%, at least 30%, at least 40%, at least 50%, at least 60%, at least 70%, at least 80%, at least 90%, or at least 95%, compared to the level of ctDNA prior to the administration. The reduction may occur, for example, in two days, three days, four days, five days, six days, one week, two weeks, three weeks, one month, two months or more).

### 1 Therapeutic Agents

[0628] Both T-Cell-MP-coronavirus-epitope conjugates and redirected T-Cell-MP-epitope conjugates or their higher order complexes (e.g., duplexes) may be employed in vitro or in vivo in conjunction with the administration of one or more therapeutic agents in method of contacting cells or tissue and/or methods of treating one or more patients or subjects. Therapeutic agents may be administered before, during (simultaneously or in combination) or after the administration of T-Cell-MP-coronavirus-epitope conjugates and redirected T-Cell-MP-epitope conjugates or their higher order complexes (e.g., duplexes). The therapeutic agents may supportive (e.g., oxygen therapy). Therapeutic agents may also be targeted at the coronavirus infection itself (e.g., modifying the cellular or humoral immune response to the infection). Alternatively, the therapeutic agents may be targeted at symptoms of the infection (e.g., the associated inflammatory response), which may result in substantial trauma to the cells or tissue of an infected individual.

[0629] Therapeutic agents targeted at the coronavirus infection itself or that modify the cellular or humoral immune response to the infection include antiviral agents and/or immunomodulatory agents such as cytokines. One group of therapeutic agents that may be employed with T-Cell-MP-coronavirus-epitope conjugates or their higher order complexes (e.g., duplexes) in the methods of treating and contacting described herein include nucleotide analogs, nucleoside analogs, chloroquine or hydroxychloroquine, anti-HIV agents, interferon beta (e.g., interferon beta 1a), protease inhibitors (e.g., cinanserin, flavonoids, diarylheptanoids), type I interferons (IFNs), recombinant IFN (e.g., rIFNβ or rIFNγ), inhibitors of IL-6 receptors (e.g., tocilizumab), inhibitors of IL-6 (e.g., anti-IL-6 antibodies such as lenzilumab), NSAIDs, and glucocorticoids. The nucleotide or nucleoside analogs may be selected from the group consisting of: remdesivir, molnupiravir, favipiravir, ribavirin and galidesivir. The therapeutic agents may be the anti-HIV agents are lopinavir or ritonavir. In any of the methods of treating a coronavirus (e.g., SARS-CoV-2) infections described herein, remdesivir may be administered in conjunction with T-Cell-MP-coronavirus-epitope conjugates or their higher order complexes (e.g., duplexes). In any of the methods of treating a coronavirus (e.g., SARS-CoV-2) infections described herein, molnupiravir may be administered in conjunction with T-Cell-MP-coronavirus-epitope conjugates or their higher order complexes (e.g., duplexes).

[0630] Antibodies directed against SARS-CoV-2, including antibodies that bind the spike protein may also be used as therapeutic agent administered in conjunction with T-Cell-MP-coronavirus-epitope conjugates or their higher order complexes (e.g., duplexes). Antibodies directed against spike protein that may be employed alone or in combination as therapeutic agents in coronavirus (e.g., SARS-CoV-2) infection include, but are not limited to, one or more of bamlanivimab, etesevimab, casirivimab, and/or imdevimab. By way of example, a combination of bamlanivimab and etesevimab or a combination of casirivimab and imdevimab may be employed. Those antibodies, or combinations of those antibodies, may function to block viral entry and may also neutralize the virus and/or subject viral particles to attack by immune cells.

[0631] In some instance compounds that inhibit coronavirus entry into cells may be administered in conjunction with T-Cell-MP-coronavirus-epitope conjugates or their higher order complexes (e.g., duplexes). Inhibitors of coronavirus entry into cells include, but are not limited to, tilorone, mitoxantrone, raloxifene, and piceatannol, sunitinib, and BNTX. More specifically, mitoxantrone, raloxifene, and piceatannol are reported to bind to heparin sulfate, while sunitinib (SUTENT®) and BNTX target the actin cytoskeleton and tilorone inhibits lysosomes. See, e.g., Zhang et al., bioRxiv preprint doi: https://doi.org/10.1101/2020.07.14.202549 and https://www.ott.nih.gov/bundle/tab-3428. Either or both of tilorone and raloxifene (e.g., in combination) can be administered orally.

[0632] Therapeutic agents that target symptoms of the infection (e.g., the associated inflammatory response) one or more NSAIDs and or corticosteroids. The NSAIDs may be Cox-1 and/or Cox-2 inhibitors. In particular, the NSAIDs may be selected from the group consisting of celecoxib, diclofenac, diflunisal, etodolac, ibuprofen, indomethacin, ketoprofen, and naproxen. Corticosteroids may be selected from, for example, cortisone, dexamethasone, hydrocortisone, ethamethasoneb, fludrocortisone, methylprednisolone, prednisone, prednisolone and triamcinolone.

[0633] Other therapeutic agents that may be employed in conjunction with T-Cell-MP-coronavirus-epitope conjugates or their higher order complexes (e.g., duplexes) include, but are not limited to pyronaridine, pyronaridine-artesunate, and/or quinacrine.

[0634] Where a patient is being treated for cancer, a method for treating cancer in an individual comprises: a) administering one or more redirected T-Cell-MP-epitope conjugates or their higher order complexes (e.g., duplexes); and b) administering at least one additional therapeutic agent or therapeutic treatment for treatment of the cancer. Suitable additional therapeutic agents include, but are not limited to, a small molecule cancer chemotherapeutic agent, and an immune checkpoint inhibitor. Suitable additional therapeutic treatments include, e.g., radiation, surgery (e.g., surgical resection of a tumor), and the like.

[0635] A treatment method of the present disclosure can comprise co-administration of one or more redirected T-Cell-MP-epitope conjugates or their higher order complexes (e.g., duplexes) and at least one additional therapeutic agent. By “co-administration” is meant that both a redirected T-Cell-MP-epitope conjugate or higher order complex and at least one additional therapeutic agent are administered to an individual, although not necessarily at the same time, in order to achieve a therapeutic effect that is the result of having administered both the redirected T-Cell-MP-epitope conjugate and the at least one additional therapeutic agent. The administration of the redirected T-Cell-MP-epitope conjugate and the at least one additional therapeutic agent can be substantially simultaneous, e.g., the redirected T-Cell-MP-epitope conjugate can be administered to an individual within about 1 minute to about 24 hours (e.g., within about 1 minute, within about 5 minutes, within about 15 minutes, within about 30 minutes, within about 1 hour, within about 4 hours, within about 8 hours, within about 12 hours, or within about 24 hours) of administration of the at least one additional therapeutic agent. In some cases, a redirected T-Cell-MP-epitope conjugate of the present disclosure is administered to an individual who is undergoing treatment with, or who has undergone treatment with, the at least one additional therapeutic agent. The administration of the redirected T-Cell-MP-epitope conjugate can occur at different times and/or at different frequencies.

[0636] As an example, a treatment method can comprise co-administration of a redirected T-Cell-MP-epitope conjugate or higher order complex and an immune checkpoint inhibitor such as an antibody specific for an immune checkpoint. By “co-administration” is meant that both a redirected T-Cell-MP-epitope conjugate and an immune checkpoint inhibitor (e.g., an antibody specific for an immune checkpoint polypeptide) are administered to an individual, although not necessarily at the same time, in order to achieve a therapeutic effect that is the result of having administered both the redirected T-Cell-MP-epitope conjugate and the immune checkpoint inhibitor (e.g., an antibody specific for an immune checkpoint polypeptide). The administration of the redirected T-Cell-MP-epitope conjugate and the immune checkpoint inhibitor (e.g., an antibody specific for an immune checkpoint polypeptide) can be substantially simultaneous, e.g., the redirected T-Cell-MP-epitope conjugate can be administered to an individual within about 1 minute to about 24 hours (e.g., within about 1 minute, within about 5 minutes, within about 15 minutes, within about 30 minutes, within about 1 hour, within about 4 hours, within about 8 hours, within about 12 hours, within about 24 hours, within 1 week, 3 weeks 3 weeks, four weeks or a month following administration of the immune checkpoint inhibitor (e.g., an antibody specific for an immune checkpoint polypeptide). In some cases, a redirected T-Cell-MP-epitope conjugate of the present disclosure is administered to an individual who is undergoing treatment with, or who has undergone treatment with, an immune checkpoint inhibitor (e.g., an antibody specific for an immune checkpoint polypeptide). The administration of the redirected T-Cell-MP-epitope conjugate and the immune checkpoint inhibitor (e.g., an antibody specific for an immune checkpoint polypeptide) can occur at different times and/or at different frequencies. Where there is an established dosing interval for the checkpoint inhibitor, depending on the interval, it may be possible to administer the redirected T-Cell-MP-epitope conjugate on the same day as the checkpoint inhibitor. For example, in some cases, where the dosing schedule for pembrolizumab is once every three weeks, the pharmaceutical composition comprising the redirected T-Cell-MP-epitope conjugate may be administered on the same day.

[0637] Exemplary immune checkpoint inhibitors include inhibitors that target an immune checkpoint polypeptide such as CD27, CD28, CD40, CD122, CD96, CD73, CD47, OX40, GITR, CSF1R, JAK, PI3K delta, PI3K gamma, TAM, arginase, CD137 (also known as 4-1BB), ICOS, A2AR, B7-H3, B7-H4, BTLA, CTLA-4, LAG3, TIM3, VISTA, CD96, TIGIT, CD122, PD-1, PD-L1 and PD-L2. In some cases, the immune checkpoint polypeptide is a stimulatory checkpoint molecule selected from CD27, CD28, CD40, ICOS, OX40, GITR, CD122 and CD137. In some cases, the immune checkpoint polypeptide is an inhibitory checkpoint molecule selected from A2AR, B7-H3, B7-H4, BTLA, CTLA-4, IDO, KIR, LAG3, PD-1, TIM3, CD96, TIGIT and VISTA.

[0638] In some cases, the immune checkpoint inhibitor is an antibody specific for an immune checkpoint polypeptide. In some cases, the anti-immune checkpoint antibody is a monoclonal antibody. In some cases, the anti-immune checkpoint antibody is humanized, such that the antibody does not substantially elicit an immune response in a human. In some cases, the anti-immune checkpoint antibody is a humanized monoclonal antibody. In some cases, the anti-immune checkpoint antibody is a de-immunized monoclonal antibody. In some cases, the anti-immune checkpoint antibody is a fully human monoclonal antibody. In some cases, the anti-immune checkpoint antibody inhibits binding of the immune checkpoint polypeptide to a ligand for the immune checkpoint polypeptide. In some cases, the anti-immune checkpoint antibody inhibits binding of the immune checkpoint polypeptide to a receptor for the immune checkpoint polypeptide.

[0639] Suitable anti-immune checkpoint antibodies include, but are not limited to, nivolumab (Bristol-Myers Squibb), pembrolizumab (Merck), pidilizumab (Curetech), AMP-224 (GlaxoSmithKline/Amplimmune), MPDL3280A (Roche), MDX-1105 (Medarex, Inc./Bristol Myer Squibb), MEDI-4736 (Medimmune/AstraZeneca), arelumab (Merck Serono), ipilimumab (YERVOY, (Bristol-Myers Squibb), tremelimumab (Pfizer), pidilizumab (CureTech, Ltd.), IMP321 (Immutep S.A.), MGA271 (Macrogenics), BMS-986016 (Bristol-Meyers Squibb), lirilumab (Bristol-Myers Squibb), urelumab (Bristol-Meyers Squibb), PF-05082566 (Pfizer), IPH2101 (Innate Pharma/Bristol-Myers Squibb), MEDI-6469 (MedImmune/AZ), CP-870,893 (Genentech), Mogamulizumab (Kyowa Hakko Kirin), Varlilumab (CellDex Therapeutics), Avelumab (EMD Serono), Galiximab (Biogen Idec), AMP-514 (Amplimmune/AZ), AUNP 12 (Aurigene and Pierre Fabre), Indoximod (NewLink Genetics), NLG-919 (NewLink Genetics), INCB024360 (Incyte); KN035; and combinations thereof. For example, in some cases, the immune checkpoint inhibitor is an anti-PD-1 antibody. Suitable anti-PD-1 antibodies include, e.g., nivolumab, pembrolizumab (also known as MK-3475), pidilizumab, SHR-1210, PDR001, and AMP-224. In some cases, the anti-PD-1 monoclonal antibody is nivolumab, pembrolizumab or PDR001. Suitable anti-PD1 antibodies are described in U.S. Patent Publication No. 2017/0044259. For pidilizumab, see, e.g., Rosenblatt et al. (2011) J. Immunother. 34:409-18. The immune checkpoint inhibitor may be an anti-CTLA-4 antibody. The anti-CTLA-4 antibody may be ipilimumab or tremelimumab. For tremelimumab, see, e.g., Ribas et al. (2013) J. Clin. Oncol. 31:616-22. The immune checkpoint inhibitor may be an anti-PD-L1 antibody. The anti-PD-L1 monoclonal antibody may be BMS-935559, MEDI4736, MPDL3280A (also known as RG7446), KN035, or MSB0010718C. The anti-PD-L1 monoclonal antibody may be MPDL3280A (atezolizumab) or MEDI4736 (durvalumab). For durvalumab, see, e.g., WO 2011/066389. For atezolizumab, see, e.g., U.S. Pat. No. 8,217,149. The immune checkpoint inhibitor may be an anti-TIGIT antibody that binds to T-cell immunoreceptor with Ig and ITIM domains (TIGIT). The anti-TIGIT antibody may be BMS-986207 (Bristol-Myers Squibb). The anti-TIGIT antibody may be tiragolumab. The anti-TIGIT antibody may be EOS88448 (EOS-448). See, e.g., U.S. Pat. Nos. 11,008,390 and 10,189,902; U.S. Patent Publication No. 2017/0088613; and WO 2019/137541. The anti-TIGIT antibody may be domvanalimab (iTeos/GSK), ociperlimab (Beigene/Novartis) or AGEN1777 (Agenus/BMS).

[0640] Among such checkpoint inhibitors, antibodies to PD-1, PD-L1, and CTLA-4 are the most common, with at least nivolumab, tremelimumab, pembrolizumab, ipilimumab, cemiplimab, atezolizumab, avelumab, tisleizumab and durvalumab having been approved by the FDA and/or regulatory agencies outside of the U.S. Use of anti-TIGIT checkpoint inhibitors also is becoming increasingly common. A redirected T-Cell-MP-epitope conjugate also may be co-administered with combinations of checkpoint inhibitors, e.g., a combination of (i) an antibody to PD-1 or PD-L1, (ii) an antibody to CTLA-4, and/or (iii) an anti-TIGIT antibody.

### XII. SUBJECTS SUITABLE FOR TREATMENT

[0641] Subjects suitable for treatment with a T-Cell-MP-coronavirus epitope conjugate or higher order complex include individuals who have coronavirus infection or who may be at risk of a coronavirus infection. In particular, subjects suitable for treatment with a T-Cell-MP-coronavirus epitope conjugate include individuals who have a betacoronavirus infection such as SARS or MERS, or who are at risk of incurring a SARS or MERS infection, e.g., a SARS-CoV-2 infection, and/or are at greater risk of severe illness from such infection (e.g., e.g., a SARS-CoV-2 infection) than the general population. Suitable subjects include individuals who have been diagnosed as having SARS-CoV-2 (Covid-19), individuals who have been treated for coronavirus infection (e.g., SARS, SARS-CoV-2, or MERS) but who failed to respond to the treatment, individuals suffering from Long COVID, and individuals who have been treated for coronavirus infection and who initially responded but subsequently became refractory to the treatment. Individuals who are at greater risk of severe illness from an infection such as a SARS-CoV-2 infection than the general population include, but are not limited to, individuals having one or more underlying medical conditions selected from the group consisting of chronic kidney disease, COPD (chronic obstructive pulmonary disease), Down Syndrome, heart conditions, such as heart failure, coronary artery disease, or cardiomyopathies, an immunocompromised state (weakened immune system) from solid organ transplant, obesity (body mass index [BMI] of 30 kg/m² or higher but <40 kg/m²), severe obesity (BMI ≥40 kg/m²), pregnancy, sickle cell disease, a history of smoking, Type 2 diabetes mellitus, asthma (moderate-to-severe), cerebrovascular disease (affects blood vessels and blood supply to the brain), cystic fibrosis, hypertension or high blood pressure, an immunocompromised state (weakened immune system) from blood or bone marrow transplant, immune deficiencies, HIV, use of corticosteroids, or use of other immune weakening medicines, neurologic conditions such as dementia, liver disease, overweight (BMI >25 kg/m², but <30 kg/m²), pulmonary fibrosis (having damaged or scarred lung tissues), thalassemia or other blood disorders, and Type 1 diabetes mellitus.

[0642] Subjects suitable for treatment, e.g., by selectively delivering an activating MOD to a T cell selective for a coronavirus epitope or by modulating the activity of at least one coronavirus specific T cell (e.g., inducing a coronavirus specific T cell to proliferate) include those with a confirmed coronavirus infection, those diagnosed as positive for an infection by a coronavirus, and those at risk of contracting a coronavirus infection.

[0643] Subjects suitable for treatment with one or more redirected T-Cell-MP-coronavirus epitope conjugates or higher order complexes thereof include individuals who have neoplasms in the form of benign growths (e.g., non-malignant tumors) or malignant growths (e.g., occurring as a solid metastatic cancer or non-solid cancer such as leukemia, lymphoma or myeloma) and who have had a coronavirus infection and/or been vaccinated such that the individuals have T cells that bind the coronavirus epitope presented by the redirected T-Cell-MP-coronavirus epitope conjugate. Such subjects include individuals who have been diagnosed as having cancer, individuals who have been treated for cancer but who failed to respond to the treatment, and individuals who have been treated for cancer and who initially responded but subsequently became refractory to the treatment and/or whose disease progressed while on the prior treatment.

[0644] In some cases, the subject is an individual who is undergoing treatment with an immune checkpoint inhibitor. In some cases, the subject is an individual who has undergone treatment with one or more immune checkpoint inhibitors, but whose disease has progressed despite having received such treatment. In some cases, the subject is an individual who is undergoing treatment with, or who has undergone treatment with, a cancer chemotherapeutic agent. In some cases, the subject is an individual who is preparing to undergo treatment with, is undergoing treatment with, or who has undergone treatment with, an immune checkpoint inhibitor. In some cases, the subject is an individual who is preparing to undergo treatment with, is undergoing treatment with, or who has undergone treatment with, a cancer chemotherapeutic agent, radiation treatment, surgery, and/or treatment with another therapeutic agent. In some cases, a pharmaceutical composition comprising the redirected T-Cell-MP-coronavirus epitope conjugate or higher order complex thereof is administered in the adjuvant or neoadjuvant setting.

### XIII. DOSAGES AND ROUTES OF ADMINISTRATION

### A. Dosages

[0645] A suitable dosage of a T-Cell-MP-epitope conjugate, redirected T-Cell-MP-coronavirus epitope conjugate, or their higher order complexes (e.g., duplexes) can be determined by an attending physician, or other qualified medical personnel, based on various clinical factors. As is well known in the medical arts, dosages for any one patient depend upon many factors, including the patient's size, body surface area, age, the particular T-Cell-MP-epitope conjugate (including the particular MOD(s) employed in the T-Cell-MP-epitope conjugate), redirected T-Cell-MP-coronavirus epitope conjugate (including the particular MOD(s) employed in the redirected T-Cell-MP-coronavirus epitope conjugate), or a higher order complex to be administered, sex of the patient, time, route of administration, general health, and other drugs being administered concurrently. The number and type of MODs per molecule also can play a significant factor. Depending on these factors, a T-Cell-MP-epitope conjugate or a higher order complex thereof, such as a duplex, may be administered in amounts between 1 ng/kg body weight and 20 mg/kg body weight per dose, e.g., from 0.1 mg/kg body weight to 10 mg/kg body weight, e.g., from 0.5 mg/kg body weight to 5 mg/kg body weight; from 1 mg/kg body weight to 5 mg/kg body weight, from 2 mg/kg body weight to 4 mg/kg body weight, however, doses below or above this exemplary range are envisioned, especially considering the aforementioned factors. For example, for duplex molecules comprising 4 reduced-affinity IL-2 MODs such as the H16 and F42 substitutions described above, (e.g., H61A and F42A) have been shown to provide a range of therapeutic activity when administer in dosages of 2 mg/kg body weight or higher, with dosages of 2 and 4 mg/kg providing therapeutic benefit and acceptable patient tolerability. If the regimen is a continuous infusion, it can also be in the range of 1 μg to 10 mg per kilogram of body weight per minute. A T-Cell-MP-epitope conjugate, redirected T-Cell-MP-coronavirus epitope conjugate, or a higher order complex can be administered in an amount of from 1 mg/kg body weight to 50 mg/kg body weight per dose. A T-Cell-MP-epitope conjugate, redirected T-Cell-MP-coronavirus epitope conjugate, or a higher order complex can be administered in an amount of from 1 mg/kg body weight to 5 mg/kg body weight per dose. A T-Cell-MP-epitope conjugate, redirected T-Cell-MP-coronavirus epitope conjugate, or a higher order complex, can be administered in an amount of from 5 mg/kg body weight to 10 mg/kg body weight per dose. A T-Cell-MP-epitope conjugate, redirected T-Cell-MP-coronavirus epitope conjugate, or a higher order complex can be administered in an amount of from 10 mg/kg body weight to 15 mg/kg body weight, or from 15 mg/kg body weight to 20 mg/kg body weight per dose. A T-Cell-MP-epitope conjugate, redirected T-Cell-MP-coronavirus epitope conjugate, or a higher order complex can be administered in an amount of from 20 mg/kg body weight to 25 mg/kg body weight, or from 25 mg/kg body weight to 30 mg/kg body weight per dose. A T-Cell-MP-epitope conjugate, redirected T-Cell-MP-coronavirus epitope conjugate, or a higher order complex can be administered in an amount of from 30 mg/kg body weight to 35 mg/kg body weight, or from 35 mg/kg body weight to 40 mg/kg body weight per dose. A T-Cell-MP-epitope conjugate, redirected T-Cell-MP-coronavirus epitope conjugate, or a higher order complex can be administered in an amount of from 40 mg/kg body weight to 50 mg/kg body weight per dose.

[0646] In some cases, a suitable dose of a T-Cell-MP-epitope conjugate, redirected T-Cell-MP-coronavirus epitope conjugate, or a higher order complex is from 0.01 μg to 100 mg per kg of body weight, e.g., from about 0.5 to about 1 mg/kg, from about 1 mg/kg to about 5 mg/kg, from about 5 mg/kg to about 10 mg/kg, or from about 10 mg/kg to about 20 mg/kg of body weight per dose. Persons of ordinary skill in the art can easily estimate repetition rates for dosing based on measured residence times and concentrations of the administered agent in bodily fluids or tissues. Following successful treatment, it may be desirable to have the patient undergo maintenance therapy to prevent the recurrence of the disease state, wherein a T-Cell-MP-epitope conjugate, redirected T-Cell-MP-coronavirus epitope conjugate, or a higher order complex is administered in maintenance doses, in one of the above-recited ranges.

[0647] Those of skill will readily appreciate that dose levels can vary as a function of the specific T-Cell-MP-epitope conjugate, the severity of the symptoms and the susceptibility of the subject to side effects. Preferred dosages for a given compound are readily determinable by those of skill in the art by a variety of means.

[0648] In some cases, multiple doses of a T-Cell-MP-epitope conjugate are administered. The frequency of administration and dose of a T-Cell-MP-epitope conjugate can vary depending on any of a variety of factors, e.g., the level of immune protection generated, severity of the symptoms (in cases of infection), route of administration, etc. For example, in some cases, a T-Cell-MP-epitope conjugate is administered once every year, once every 2-6 months, or once per month. In other cases, a T-Cell-MP-epitope conjugate is administered once every three weeks, or more frequently. When administered to persons who are uninfected and at risk of infection in order to cause priming and/or expansion of epitope-specific T cells and/or induce epitope-specific T cell memory, the administration can comprise an initial dose followed by one or more subsequent doses that are administered within a month, within one to two months, within two to four months, within six months, within six to twelve months, or longer than twelve months after the prior dose. Where the T-Cell-MP-epitope conjugate is administered to an infected individual, it may be administered more often, e.g., once a week, twice a week or more often, or less frequently than once a week, e.g., once every two weeks or even less frequently.

[0649] The frequency of administration of one or more redirected T-Cell-MP-coronavirus epitopes, or a higher order complex such as a duplex, can vary depending on any of a variety of factors, but generally speaking will be administered once a week, once every two weeks, once every three weeks, once every four weeks, once per month, or less frequently than once per month, e.g., once every five weeks, once every six weeks, once every two months, once every three months, etc., but also can be administered more frequently than once per week, e.g., twice per week (biw), three times per week (tiw), four times per week, five times per week, six times per week, every other day (qod), or daily (qd). In some cases, the redirected T-Cell-MP-coronavirus epitope conjugate, or a higher order complex such as a duplex is administered once every three weeks. Administration generally should be stopped upon disease progression or unacceptable toxicity.

[0650] The duration of administration can vary, depending on any of a variety of factors, e.g., patient response, etc. For example, a redirected T-Cell-MP-coronavirus epitopes, or a higher order complex such as a duplex can be administered over a period of time ranging from one month to about two months, from about two months to about four months, from about four months to about six months, from about six months to about eight months, from about eight months to about 1 year, from about 1 year to about 2 years, or from about 2 years to about 4 years, or more. Typically, the TMMP will continue to be dosed for at least as long as the patient continues to receive a clinically determined benefit, which likely will be from at least many months to multiple years.

### B. Routes of Administration

[0651] An active agent (a T-Cell-MP-epitope conjugate) is administered to an individual using any available method and route suitable for drug delivery, including in vivo and in vitro methods, as well as systemic and localized routes of administration.

[0652] Conventional and pharmaceutically acceptable routes of administration include intramuscular, intralymphatically, intratracheal, intracranial, subcutaneous, intradermal, topical, intravenous, intra-arterial, rectal, nasal, oral, and other enteral and parenteral routes of administration. Routes of administration may be combined, if desired, or adjusted depending upon the T-Cell-MP-epitope conjugate and/or the desired effect. As noted above, a T-Cell-MP-epitope conjugate, can be administered in a single dose or in multiple doses.

[0653] In some embodiments, a T-Cell-MP-epitope conjugate or redirected T-Cell-MP-coronavirus epitopes, or a higher order complex thereof such as a duplex, is administered intravenously. In some embodiments, a T-Cell-MP-epitope conjugate is administered intramuscularly. In some embodiments, a T-Cell-MP-epitope conjugate is administered subcutaneously.

### XIV. CERTAIN ASPECTS

[0654] While the present invention has been described with reference to the specific embodiments thereof, it should be understood by those skilled in the art that various changes may be made, and equivalents may be substituted without departing from the true spirit and scope of the invention as set forth in the appended claims. In addition, many modifications may be made to adapt a particular situation, material, composition of matter, process, and/or process step or steps, to the objective, spirit and scope of the present invention. All such modifications are intended to be within the scope of the claims appended hereto.
[0655] 1. A T cell modulatory polypeptide-epitope conjugate (T-Cell-MP-epitope conjugate), the polypeptide comprising (e.g., in the N-terminal to C-terminal direction):
   [0656] (i) optionally one or more independently selected MOD polypeptide sequences (e.g., two or more MOD polypeptide sequences, such as in tandem, wherein when there are two or more MOD polypeptide sequences they are optionally joined to each other by independently selected L1 linkers),
   [0657] (ii) an optional L2 linker polypeptide sequence joining the one or more MOD polypeptide sequences to a β2M polypeptide sequence,
   [0658] (iii) the β2M polypeptide sequence,
   [0659] (iv) an optional L3 linker polypeptide sequence (e.g., from 10-50 aas in length),
   [0660] (v) a class I MHC-H (e.g., HLA heavy chain or “HLA-H”) polypeptide sequence,
   [0661] (vi) an optional L4 linker polypeptide sequence,
   [0662] (vii) a scaffold polypeptide sequence (e.g., an Ig Fc sequence),
   [0663] (viii) an optional L5 linker polypeptide sequence, and
   [0664] (ix) optionally one or more independently selected MOD polypeptide sequences (e.g., two or more MOD polypeptide sequences, such as in tandem, wherein when there are two or more MOD polypeptide sequences they are optionally joined to each other by independently selected L6 linkers);
   [0665] wherein
   [0666] the T-Cell-MP-epitope conjugate comprises at least one MOD polypeptide sequence (e.g., at least one of the MODs of element (i) or (ix);
   [0667] at least one of the β2M polypeptide sequence, the L3 linker polypeptide sequence, and/or the MHC-H polypeptide sequence comprises one or more chemical conjugation sites to which a peptide presenting a coronavirus epitope (e.g., a peptide, phosphopeptide, glycopeptide, or lipopeptide presenting a coronavirus epitope) is covalently bound, directly or indirectly (e.g., through a linker) to at least one of the one or more chemical conjugation sites; and
   [0668] the peptide presenting a coronavirus epitope (e.g., a peptide, phosphopeptide, glycopeptide, lipopeptide or carbohydrate epitope) comprises five (5) or more (e.g., 6, 7, 8, 9, 10, 11, 12, 13, 14, 15 or 16, or 6 or more) contiguous amino acids of any of the coronavirus protein or a coronavirus peptide sequence set forth in FIGS. 20A to 20J, FIG. 2I, FIG. 22, Table 2, Table 3, or Table 3a.
   [0669] As noted in aspects 35 to 41, when the MHC-H polypeptide sequence is an HLA-E polypeptide sequence, the peptide presenting an HLA-E restricted non-coronavirus epitope may be present (conjugated to) in the T-Cell-MP in place of the peptide presenting a coronavirus epitope.
[0670] 2. The T-Cell-MP-epitope conjugate of aspect 1, the polypeptide comprising in the N-terminal to C-terminal direction the elements:
   [0671] (i) optionally one or more independently selected MOD polypeptide sequences (e.g., two or more MOD polypeptide sequences, such as in tandem, wherein when there are two or more MOD polypeptide sequences they are optionally joined to each other by independently selected L1 linkers);
   [0672] (ii) an optional L2 linker polypeptide sequence;
   [0673] (iii) a β2M polypeptide sequence;
   [0674] (iv) an optional L3 linker polypeptide sequence (e.g., from 10-50 aas in length);
   [0675] (v) a class I MHC-H (e.g., HLA-H) polypeptide sequence;
   [0676] (vi) an optional L4 linker polypeptide sequence;
   [0677] (vii) a scaffold polypeptide sequence (e.g., an Ig Fc sequence);
   [0678] (viii) an optional L5 linker polypeptide sequence; and
   [0679] (ix) optionally one or more independently selected MOD polypeptide sequences (e.g., two or more MOD polypeptide sequences, such as in tandem, wherein when there are two or more MOD polypeptide sequences they are optionally joined to each other by independently selected L6 linkers).
[0680] The chemical conjugation site for epitope conjugation of aspects 1 and 2 permits the covalent attachment of an epitope presenting molecule (e.g., a peptide presenting an epitope) to the T-Cell-MP such that it can be bound by the MHC-H polypeptide and presented to a TCR. It is understood that the T-Cell-MP-epitope conjugates of aspects 1 and 2 do not comprise any peptide other than the conjugated epitope (either covalently attached to, or as a fusion with, the T-Cell-MP polypeptide) that can be located in the binding cleft of the MHC-H/β2M polypeptide sequences and presented to a TCR. Because the T-Cell-MP-epitope conjugates of aspects 1 and 2, and their dependent aspects, comprise a peptide presenting a coronavirus epitope, they may also be referred to as T-Cell-MP-coronavirus epitope conjugates.
[0681] 3. The T-Cell-MP-epitope conjugate of aspect 1 or aspect 2, wherein the MHC-H polypeptide sequence comprises a human class I MHC-H chain polypeptide sequence selected from HLA-A, HLA-B, HLA-C, HLA-E, HLA-F, and HLA-G MHC-H polypeptide sequences having at least 90% (e.g., at least 95% or at least 98%) or 100% sequence identity to at least 200 (e.g., at least 225, at least 250, at least 260, or at least 275) contiguous aas of a MHC-H polypeptide provided in any of FIGS. 3A-3H, or an MHC-H consensus sequence polypeptide recited in FIG. 3I.
[0682] 4. The T-Cell-MP-epitope conjugate of any preceding aspect, wherein the MHC-H sequence does not include the MHC-H transmembrane domain, or a portion thereof, that will anchor the T-Cell-MP in a cell membrane.
[0683] 5. The T-Cell-MP-epitope conjugate of any preceding aspect, wherein the MHC-H polypeptide sequence has at least 90% (e.g., at least 95% or at least 98%) or 100% sequence identity to at least 200 (e.g., at least 225, at least 250, at least 260, or at least 275) contiguous aas of the α1, α2, and α3 domains of an HLA allele. For example, the MHC-H polypeptide sequence may have at least 95% or at least 98% sequence identity to at least 225 contiguous aas of an HLA polypeptide sequence (e.g., comprising the α1, α2, and α3 domains of an HLA allele) in any of FIGS. 3A-3H, or an HLA allele recited in FIG. 21 or FIG. 22.
[0684] 6. The T-Cell-MP-epitope conjugate of any of aspects 1-5, wherein the coronavirus peptide epitope comprises 6 to 25, or 8 to 25, contiguous amino acids a SARS-CoV-2 variant spike protein epitope selected from the group consisting of: KVGGNYNYR (SEQ ID NO:473); KGFNCYFPL (SEQ ID NO:475); DVYYHKNNK (SEQ ID NO: 477); NSANLAAIK (SEQ ID NO:480); RFANPVLPF (SEQ ID NO:482); AYSNNSIAIPINF (SEQ ID NO:484); PINLVRGL (SEQ ID NO:486); SRRRARSVA (SEQ ID NO:487); IPINFTISV (SEQ ID NO:489); NLRTRTQL (SEQ ID NO:491); NFTNRTQL (SEQ ID NO:492); LXXXHRSYL (SEQ ID NO:494); LPSAYTNSF (SEQ ID NO: 496); and AENNSY (SEQ ID NO:498).
[0685] 7. The T-Cell-MP-epitope conjugate of any of aspects 1-5, wherein the peptide presenting a coronavirus epitope comprises a portion of the spike protein of SEQ ID NO:566 bearing one or two sequence changes selected from the group consisting of T19R, A67V, del69-70, (V70F*), T95I, G142D, del142-144, Y145D, R158G, del211, L212I, ins214EPE, (A222V*), (W258L*), G339D, S371L, S373P, S375F, K417N, N440K, G446S, L452R, S477N, T478K, E484A, Q493R, G496S, Q498R, N501Y, Y505H, T547K, D614G, H655Y, N679K, P681H, P681R, N764K, D796Y, N856K, D950N, Q954H, N969K, and L981F.
[0686] 8. The T-Cell-MP-epitope conjugate of any of aspects 1-5, wherein the peptide presenting a coronavirus epitope comprises a portion of the spike protein of SEQ ID NO:566 bearing one or two substitutions selected from the group consisting of T95I, K417N*T478K, and D614G.
[0687] 9. The T-Cell-MP-epitope conjugate of any of aspects 1-5, wherein the MHC-H polypeptide sequence has at least 90% (e.g., at least 95%, or at least 98%) or 100% sequence identity to at least 200 (e.g., at least 225, at least 250, at least 260, or at least 275) contiguous aas of an HLA allele (e.g. as provided in FIG. 3E, SEQ ID NOs: 24, 27, and 32-38). For example, the MHC-H polypeptide sequence may have at least 95% or at least 98% sequence identity to at least 225 contiguous aas of HLA-A*0101, HLA-A*0201, HLA-A*0301, HLA-A*1101, HLA-A*2301, HLA-A*2402, HLA-A*2407, HLA-A*3303, or HLA-A*3401 polypeptide sequence provided in FIG. 3E (SEQ ID NOs: 24, 27, and 32-38), or an HLA-A allele recited in FIG. 21 or FIG. 22. The MHC-H polypeptide sequence may also have at least 95% or at least 98% sequence identity to at least 250 contiguous aas of an HLA-A allele such as those provided in FIG. 3E.
[0688] 10. The T-Cell-MP-epitope conjugate of aspect 9, wherein the MHC-H polypeptide sequence has at least 90% (e.g., at least 95% or at least 98%) or 100% sequence identity to at least 200 (e.g., at least 225, at least 250, at least 260, or at least 275) contiguous aas of an HLA-A*0101, HLA-A*0201, HLA-A*1101, HLA-A*2402, HLA-A*3303, or HLA-A*3401 polypeptide sequence (e.g., as provided in FIG. 3E).
[0689] 11. The T-Cell-MP-epitope conjugate of any of aspects 1-10, wherein the epitope is an HLA-A restricted epitope set forth in Table 2, Table 3, Table 3a, FIG. 21, or FIG. 22, or of a protein set forth in any of FIGS. 20A to 20J.
[0690] 12. The T-Cell-MP-epitope conjugate of any of aspects 1-10, wherein the epitope is an HLA-A restricted epitope set forth in Table 2.
[0691] 13. The T-Cell-MP-epitope conjugate of any of aspects 1-10, wherein the epitope is an HLA-A restricted epitope set forth in Table 3.
[0692] 14. The T-Cell-MP-epitope conjugate of any of aspects 1-10, wherein the epitope is an HLA-A restricted epitope set forth in Table 3a.
[0693] 15. The T-Cell-MP-epitope conjugate of any of aspects 1-4, wherein the MHC-H polypeptide sequence has at least 90% (e.g., at least 95% or at least 98%) or 100% sequence identity to at least 200 (e.g., at least 225, at least 250, at least 260, or at least 275) contiguous aas of the α1, α2, and α3 domains of an HLA-B allele (e.g., as provided in FIG. 3F, SEQ ID NOs: 40-46), or an HLA-B allele recited in FIG. 21 or FIG. 22. For example, the MHC-H polypeptide sequence may have at least 95% or at least 98% sequence identity to at least 225 contiguous aas of an HLA-B allele (e.g., as provided in FIG. 3F).
[0694] 16. The T-Cell-MP-epitope conjugate of any of aspects 1-4 or 15, wherein the MHC-H polypeptide sequence has at least 90% (e.g., at least 95% or at least 98%) or 100% sequence identity to at least 200 (e.g., at least 225, at least 250, at least 260, or at least 275) contiguous aas of an HLA-B*0702, HLA-B*0801, HLA-B*1501, HLA-B*1502, B27 (subtypes HLA-B*2701-2759), HLA-B*2705, HLA-B*3501, HLA-B*3802, HLA-B*4001, HLA-B*4402, HLA-B*4403, HLA-B*4601, HLA-B*5301, or HLA-B*5801 polypeptide sequence (e.g., as provided in FIG. 3F, SEQ ID NOs: 40-46), or an HLA-B allele recited in FIG. 21 or FIG. 22. For example, the MHC-H polypeptide sequence may have at least 95% or at least 98% sequence identity to at least 250 contiguous aas of an HLA-B allele such as those provided in FIG. 3F, SEQ ID NOs: 40-46.
[0695] 17. The T-Cell-MP-epitope conjugate of any of aspects 1-4, 15, or 16, wherein the MHC-H sequence has at least 90% (e.g., at least 95% or at least 98%) or 100% sequence identity to at least 200 (e.g., at least 225, at least 250, at least 260, or at least 275) contiguous aas of HLA-B*0702.
[0696] 18. The T-Cell-MP-epitope conjugate of any of aspects 1-4 or 15, wherein the epitope is an HLA-B restricted epitope set forth in Table 2, Table 3, Table 3a, FIG. 21, or FIG. 22, or of a protein set forth in any of FIGS. 20A to 20J.
[0697] 19. The T-Cell-MP-epitope conjugate of any of aspects 1-4 or 15, wherein the epitope is an HLA-B restricted epitope set forth in Table 2.
[0698] 20. The T-Cell-MP-epitope conjugate of any of aspects 1-4 or 15, wherein the epitope is an HLA-B restricted epitope set forth in Table 3.
[0699] 21. The T-Cell-MP-epitope conjugate of any of aspects 1-4 or 15, wherein the epitope is an HLA-B restricted epitope set forth in Table 3a.
[0700] 22. The T-Cell-MP-epitope conjugate of any of aspects 1-4, wherein the MHC-H polypeptide sequence has at least 90% (e.g., at least 95% or at least 98%) or 100% sequence identity to at least 200 (e.g., at least 225, at least 250, at least 260, or at least 275) contiguous aas of the α1, α2, and α3 domains of an HLA-C allele (e.g., as provided in FIG. 3G). For example, the MHC-H polypeptide sequence may have at least 95% or at least 98% sequence identity to at least 225 contiguous aas of an HLA-C allele (e.g., as provided in FIG. 3G).
[0701] 23. The T-Cell-MP-epitope conjugate of any of aspects 1-4 or 22, wherein the MHC-H sequence has at least 90% (e.g., at least 95% or at least 98%) or 100% sequence identity to at least 200 (e.g., at least 225, at least 250, at least 260, or at least 275) contiguous aas of an HLA-C*0102, HLA-C*0303, HLA-C*0304, HLA-C*0401, HLA-C*0602, HLA-C*0701, HLA-C*0702, HLA-C*0801, or HLA-C*1502 polypeptide sequence (e.g., as provided in FIG. 3G), or an HLA-C allele recited in FIG. 21 or FIG. 22. For example, the MHC-H polypeptide sequence may have at least 95% or at least 98% sequence identity to at least 250 contiguous aas of an HLA-C allele such as those provided in FIG. 3G.
[0702] 24. The T-Cell-MP-epitope conjugate of any of aspects 1-4, 22 or 23, wherein the MHC-H polypeptide sequence has at least 90% (e.g., at least 95% or at least 98%) or 100% sequence identity to at least 200 (e.g., at least 225, at least 250, at least 260, or at least 275) contiguous aas of HLA-C*0701.
[0703] 25. The T-Cell-MP-epitope conjugate of any of aspects 1-4, 22, or 23, wherein the epitope is an HLA-C restricted epitope set forth in Table 3 or FIG. 22, or of a protein set forth in any of FIGS. 20A to 20J.
[0704] 26. The T-Cell-MP-epitope conjugate of any of aspects 1-4 or 15, wherein the epitope is an HLA-C restricted epitope set forth in Table 3.
[0705] 27. The T-Cell-MP-epitope conjugate of any of aspects 1-4 or 15, wherein the epitope is an HLA-C restricted epitope set forth in FIG. 3.
[0706] 28. The T-Cell-MP-epitope conjugate of any of aspects 1-4 or 15, wherein the epitope is an HLA-C restricted epitope of a protein set forth in any of FIGS. 20A to 20J.
[0707] 29. The T-Cell-MP-epitope conjugate of any of aspects 1-4, wherein the MHC-H polypeptide sequence has at least 90% (e.g., at least 95% or at least 98%) or 100% sequence identity to at least 200 (e.g., at least 225, at least 250, at least 260, or at least 275) contiguous aas of the α1, α2, and α3 domains of an HLA-E allele (e.g., as provided in FIG. 3H). For example, the MHC-H polypeptide sequence may have at least 95% or at least 98% sequence identity to at least 225 contiguous aas of an HLA-E allele (e.g., as provided in FIG. 3H).
[0708] 30. The T-Cell-MP-epitope conjugate of any of aspects 1-4 or 29, wherein the MHC-H polypeptide sequence has at least 90% (e.g., at least 95% or at least 98%) or 100% sequence identity to at least 200 (e.g., at least 225, at least 250, at least 260, or at least 275) contiguous aas of an HLA-E*0101, HLA-E*01:03, HLA-E*01:04, HLA-E*01:05, HLA-E*01:06, HLA-E*01:07, HLA-E*01:09, or HLA-E*01:10 polypeptide sequence (e.g., as provided in FIG. 3H). For example, the MHC-H polypeptide sequence may have at least 95% or at least 98% sequence identity to at least 250 contiguous aas of an HLA-E allele such as those provided in FIG. 3H.
[0709] 31. The T-Cell-MP-epitope conjugate of any of aspects 1-4, 29 or 30, wherein the MHC-H polypeptide sequence has at least 90% (e.g., at least 95% or at least 98%) or 100% sequence identity to at least 200 (e.g., at least 225, at least 250, at least 260, or at least 275) contiguous aas of the HLA-E allele consensus sequence:

GSHSLKYFHT SVSRPGRGEP RFISVGYVDD
TQFVRFDNDA ASPRMVPRAP WMEQEGSEYW
DRETRSARDT AQIFRVNLRT LRGYYNQSX1A
GSHTLQWMHG CELGPDX2RFL RGYEQFAYDG
KDYLTLNEDL RSWTAVDTAA QISEQKSNDA
SEAEHQX3X4YL EDTCVEWLHK YLEKGKETLL
HLEPPKTHVT HHPISDHEAT LRCWALGFYP
AEITLTWQQD GEGHTQDTEL VETRPAGDGT
FQKWAAVVVP SGEEX5RYTCH VQHEGLX6EPV
TLRWKPASQP TIPI,

[0710] Wherein: X1=K or E, X2=R or G, X3=R or G, X4=A or V, X5=Q or P, and X6=P or S (SEQ ID NO:58).
[0711] 32. The T-Cell-MP-epitope conjugate of aspect 31, wherein the MHC-H polypeptide sequence has at least at least 95% or at least 98% sequence identity to at least 250 contiguous aas of SEQ ID NO:58 when X1=K, X2=R, X3=R, X4=A, X5=Q, and X6=S.
[0712] 33. The T-Cell-MP-epitope conjugate of any of aspects 1-4, 29, 30, 31, or 32, wherein the epitope is an HLA-E restricted epitope of a protein set forth in any of FIGS. 20A to 20J.
[0713] 34. The T-Cell-MP-epitope conjugate of any of aspects 1-4, 29, 30, 31, or 32, wherein the epitope comprises the aa sequence VMPLSAPTL (SEQ ID NO:2058).

[0714] Although the aspects set forth above are directed to T-Cell-MP-epitope conjugates comprising a peptide presenting a coronavirus epitope, it will be understood that the T-Cell-MPs may be conjugated to peptides presenting epitopes other than coronavirus epitopes (i.e., non-coronavirus epitopes). Among those peptides presenting HLA-E restricted epitopes that associate with complexes of HLA-E and β2M including, but not limited to, the peptides set forth in aspects 35-41.
[0715] 35. The T-Cell-MP-epitope conjugate of any of aspects 1-4, 29, 30, 31, or 32, wherein the peptide presenting an HLA-E restricted epitope comprises an aa sequence selected from the group consisting of: QMPSRSLLF (SEQ ID NO: 2059), TLPKRGLFL (SEQ ID NO:2060), TGPWRSLWI (SEQ ID NO:2061), ILTDRSLWL (SEQ ID NO: 2062), VNPGRSLFL (SEQ ID NO:2063), WNRLFPPLR (SEQ ID NO:2064), TLPERTLYL (SEQ ID NO: 2065), FLPNRSLLF (SEQ ID NO:2066), VMGDRSVLY (SEQ ID NO:2067), and VMADKSIFY (SEQ ID NO: 2068).
[0716] 36. The T-Cell-MP-epitope conjugate of any of aspects 1-4, 29, 30, 31, or 32, wherein the peptide presenting an HLA-E restricted epitope comprises an aa sequence selected from the group consisting of: VMPPRTLLL (SEQ ID NO.: 2069), VMAPRTLFL (SEQ ID NO:2070), VNPGRSLFL (SEQ ID NO:2063), QMPSRSLLF (SEQ ID NO.: 2071), TLPERTLYL (SEQ ID NO:2065), VMPGRTLCF (SEQ ID NO:2072), ILTDRSLWL (SEQ ID NO:262), RMPPRSVLL (SEQ ID NO:2073), TAPARTMFL (SEQ ID NO.: 2074), and NMPARTVLF SEQ ID NO:2075.
[0717] 37. The T-Cell-MP-epitope conjugate of any of aspects 1-4, 29, 30, 31, or 32, wherein the epitope comprises the aa sequence WNRILPNAY SEQ ID NO:2076.
[0718] 38. The T-Cell-MP-epitope conjugate of any of aspects 1-4, 29, 30, 31, or 32, wherein the peptide presenting an HLA-E restricted epitope comprises the aa sequence X1-X2-X3-X4-R-X6-X7-X8-X9-X10, where: X1 is absent or S, K, A, I, L, or T; X2 is L, I, K or V; X3 is P, A or S; X4 is G, V, P, D or R; X6 is S or T; X7 is L, I, or V; X8 is F, W, or E; X9 is L. F, W or E; and X10 F, H, S, A or absent SEQ ID NO:2077.
[0719] 39. The T-Cell-MP-epitope conjugate of any of aspects 1-4, 29, 30, 31, or 32, wherein the peptide presenting an HLA-E restricted epitope comprises the aa sequence LP (G or V) RSLFL SEQ ID NO:2078, or LP (G or V) RSLWL (SEQ ID NO:2079).
[0720] 40. The T-Cell-MP-epitope conjugate of any of aspects 1-4, 29, 30, 31, or 32, wherein the peptide presenting an HLA-E restricted epitope comprises a CMV aa sequence selected from the group consisting of: VLPHRTQFL (SEQ ID NO:2080), TGAARSFFF (SEQ ID NO:2081), and VMAPRTLIL (SEQ ID NO:2082).
[0721] 41. The T-Cell-MP-epitope conjugate of any of aspects 1-4, 29, 30, 31, or 32, wherein the peptide presenting an HLA-E restricted epitope comprises a CMV aa sequence selected from the group consisting of: SAPLKTRFL “(SEQ ID NO:2083), and SVPLKTRFL (SEQ ID NO:2084).
[0722] 42. The T-Cell-MP-epitope conjugate of any of aspects 1-4, wherein the MHC-H polypeptide sequence has at least 90% (e.g., at least 95% or at least 98%) or 100% sequence identity to at least 200 (e.g., at least 225, at least 250, at least 260, or at least 275) contiguous aas of the α1, α2, and α3 domains of an HLA-F allele. For example, the MHC-H polypeptide sequence may have at least 95% or at least 98% sequence identity to at least 225 contiguous aas of an HLA-F allele.
[0723] 43. The T-Cell-MP-epitope conjugate of any of aspects 1-4 or 42, wherein the MHC-H polypeptide sequence has at least 90% (e.g., at least 95% or at least 98%) or 100% sequence identity to at least 200 (e.g., at least 225, at least 250, at least 260, or at least 275) contiguous aas of an HLA-F*0101 (HLA-F*01:01:01:01), HLA-F*01:02, HLA-F*01:03 (HLA-F*01:03:01:01), HLA-F*01:04, HLA-F*01:05, or HLA-F*01:06 polypeptide sequence (e.g., as provided in FIG. 3H). For example, the MHC-H polypeptide sequence may have at least 95% or at least 98% sequence identity to at least 250 contiguous aas of an HLA-F allele such as those provided in FIG. 3H.
[0724] 44. The T-Cell-MP-epitope conjugate of any of aspects 1-4, 42, or 43, wherein the MHC-H polypeptide sequence has at least 90% (e.g., at least 95% or at least 98%) or 100% sequence identity to at least 200 (e.g., at least 225, at least 250, at least 260, or at least 275) contiguous aas of the HLA-F allele consensus sequence: GSHSLRX1FST AVSRPGRGEP RYIAVEYVDD TQFLRFDSDA AIPRMEPREX2 WVEQEGPQYW EWTTGYAKAN AQTDRVALRN LLRRYNQSEA GSHTLQGMNG CDMGPDGRLL RGYHQHAYDG KDYISLNEDL RSWTAADTVA QITQRFYEAE EYAEEFRTYL EGECLELLRR YLENGKETLQ RADPPKAHVA HHPISDHEAT LRCWALGFYP AEITLTWORD GEEQTQDTEL VETRPAGDGT FQKWAAVVVP X3GEEQRYTCH VQHEGLPQPL ILRWEQSX4QP TIPI; wherein X1=Y or F; X2=P or Q; X3=S or P; and X4=P or L (SEQ ID NO:59).
[0725] 45. The T-Cell-MP-epitope conjugate of aspect 44, wherein the MHC-H polypeptide sequence has at least at least 95% or at least 98% sequence identity to at least 250 contiguous aas of SEQ ID NO:59; when X1=Y, X2=P, X3=S, and X4=P.
[0726] 46. The T-Cell-MP-epitope conjugate of any of aspects 1-4, 42, 43, 44, or 45, wherein the epitope is an HLA-F restricted epitope of a protein set forth in any of FIGS. 20A to 20J.
[0727] 47. The T-Cell-MP-epitope conjugate of any of aspects 1-4, wherein the MHC-H polypeptide sequence has at least 90% (e.g., at least 95% or at least 98%) or 100% sequence identity to at least 200 (e.g., at least 225, at least 250, at least 260, or at least 275) contiguous aas of the α1, α2, and α3 domains of an HLA-G allele. For example, the MHC-H polypeptide sequence may have at least 95% or at least 98% sequence identity to at least 225 contiguous aas of an HLA-G allele.
[0728] 48. The T-Cell-MP-epitope conjugate of any of aspects 1-4 or 47, wherein the MHC-H polypeptide sequence has at least 90% (e.g., at least 95% or at least 98%) or 100% sequence identity to at least 200 (e.g., at least 225, at least 250, at least 260, or at least 275) contiguous aas of an HLA-G*01:04 (HLA-G*01:04:01:01), HLA-G*01:06, HLA-G*01:07, HLA-G*01:08, HLA-G*01:09: HLA-G*01:10, HLA-G*01:11, HLA-G*01:12, HLA-G*01:14, HLA-G*01:15, HLA-G*01:16, HLA-G*01:17, HLA-G*01:18: HLA-G*01:19, HLA-G*01:20, or HLA-G*01:22 polypeptide sequence (e.g., as provided in FIG. 3H). For example, the MHC-H polypeptide sequence may have at least 95% or at least 98% sequence identity to at least 250 contiguous aas of an HLA-G allele such as those provided in FIG. 3H.
[0729] 49. The T-Cell-MP-epitope conjugate of any of aspects 1-4 or 47, wherein the MHC-H polypeptide sequence has at least 90% (e.g., at least 95% or at least 98%) or 100% sequence identity to at least 200 (e.g., at least 225, at least 250, at least 260, or at least 275) contiguous aas of the HLA-G allele consensus sequence:

GSHSMRYFSA AVX1RPGRGEP RFIAMGX2VDD
X3QFX4RFDSDS ACPRMEPRAP WVEX5EGPEYW
EEETRNTKAH AQTDRMNLQT X6RGYYNQSEA
SSHTLQWMIX7 CDLX8X9DGRLX10 RGYEQYAYDG
KDYLALNEDL RSWTAADTAA QISKRKCEAA
NVAEQRRAX11L EGTCVEWLX12R X13LENGKEX14LQ
RADPX15KTHVT HHPVFDYEAT LRCWALGFYP
AEIILTWQX16D GEDQTQDVEL VETRPAGDGT
FQKWAAVWVP SGEEQRYX17CH VQHEGLPEPL
MLRWX18QSSLP TIPI,

[0730] wherein X1=S or F, X2=Y or H, X3=T, S, or M, X4=L or V; X5=Q or R, X6=P or L, X7=G or D, X8=G or V, X9=S or C, X10=L or I, X11=Y or H, X12=H or R, X13=Y or H, X14=M or T, X15=P or A, X16=R, W, or Q, X17=T or M, X18=K or E (SEQ ID NO:60).
[0731] 50. The T-Cell-MP-epitope conjugate of aspect 49, wherein the MHC-H polypeptide sequence has at least at least 95% or at least 98% sequence identity to at least 250 contiguous aas of SEQ ID NO:60; X1=S, X2=Y, X3=T, X4=L, X5=, X6=P, X7=G, X8=G, X9=S, X10=L, X11=Y, X12=H, X13=Y, X14=M, X15=P, X16=R, X17=T, X18=K.
[0732] 51. The T-Cell-MP-epitope conjugate of any of aspects 1-4, 47, 48, 49, or 50, wherein the epitope is an HLA-G restricted epitope of a protein set forth in any of FIGS. 20A to 20J.
[0733] 52. The T-Cell-MP-epitope conjugate of any of aspects 1-51, wherein the MHC-H polypeptide sequence comprises at least one mutation (e.g., two, or three mutations) selected from the group consisting of: an alanine at position 84 (e.g., Y84A or R84A in the case of HLA-F), a cysteine at position 84 (e.g., Y84C or R84C in the case of HLA-F), a cysteine at position 139 (e.g., A139C or V139C in the case of HLA-F), and a cysteine at position 236 (e.g., A236C). See FIG. 3I for the location of those aa positions.
[0734] 53. The T-Cell-MP-epitope conjugate of any of aspects 1-52, wherein the MHC-H polypeptide sequence comprises a combination of mutations selected from the group consisting of: Y84A and A139C; Y84A and A236C; Y84C and A139C; Y84C and A236C; and Y84C, A139C and A236C.
[0735] 54. The T-Cell-MP-epitope conjugate of any of aspects 1-52, wherein the MHC-H polypeptide sequence comprises: a cysteine at position 84 (e.g., Y84C or R84C in the case of HLA-F), a cysteine at position 139 (e.g., A139C or V139C in the case of HLA-F), and optionally a cysteine at position 236 (e.g., A236C). See FIG. 3I for the location of those aa positions.
[0736] 55. The T-Cell-MP-epitope conjugate of any preceding aspect, wherein the β2M sequence has at least 90% (e.g., at least 95% or at least 98%) or 100% sequence identity to at least 70 (e.g., at least 80, at least 90, at least 96, at; east 97, or at least 98) or all contiguous aas of a mature human β2M polypeptide (e.g., aas 21-119 of NCBI accession number NP_004039.1 SEQ ID NO:61 provided in FIG. 4), and optionally comprises a cysteine at position 12 (an R12C substitution).
[0737] 56. The T-Cell-MP-epitope conjugate of any preceding aspect, wherein the β2M sequence has at least 95% or at least 98% sequence identity to at least 90 or all contiguous aas of a mature human β2M polypeptide (e.g., aas 21-119 of NCBI accession number NP_004039.1 SEQ ID NO:61 provided in FIG. 4), and optionally comprises a cysteine at position 12 (an R12C substitution).
[0738] 57. The T-Cell-MP-epitope conjugate of any of aspects 1-56, wherein the β2M sequence has up to 6 (e.g., 1, 2, 3, 4, or 5) aa substitutions within an aa segment of at least 70 (e.g., at least 80, 90, 96, 97, or 98 or all) contiguous aas of a mature human β2M polypeptide (e.g., aas 21-119 of NCBI accession number NP_004039.1 provided in FIG. 4), and optionally comprises a cysteine at position 12 (an R12C substitution).
[0739] 58. The T-Cell-MP-epitope conjugate of any of aspects 1-57, comprising at least one linker sequence comprising, consisting essentially of, consisting predominantly of (based on the number of aas), or consisting of: i) Gly and/or Ser; ii) Ala and Ser; iii) Gly, Ala, and Ser; iv) Gly, Ser, and Cys (e.g., a single Cys residue); v) Ala, Ser, and Cys (e.g., a single Cys residue); or vi) Gly, Ala, Ser, and Cys (e.g., a single Cys residue).
[0740] 59. The T-Cell-MP-epitope conjugate any of aspects 1-57, comprising at least one linker (e.g., any of linkers L1-L6) that comprises one or more sequences selected independently from: polyG (e.g., comprising 1-10 Gly residues), GA, AG, AS, SA, GS, GSGGS (SEQ ID NO:121), GGGS (SEQ ID NO:122), GGSG (SEQ ID NO: 123), GGSGG (SEQ ID NO:124), GSGSG (SEQ ID NO:125), GSGGG (SEQ ID NO:126), GGGSG (SEQ ID NO: 127), GSSSG (SEQ ID NO:128), GGGGS (SEQ ID NO: 130), or AAAGG (SEQ ID NO: 132), any of which may be repeated 1, 2, 3, 4, 5, 6, 7, 8, 9, or 10 times.
[0741] 60. The T-Cell-MP-epitope conjugate of any preceding aspect, wherein at least one, at least two, or at least three linker comprises a G4S sequence (SEQ ID NO:130) that may be repeated from 1-10 times (e.g., repeated 1, 2, 3, 4, 5, 6, 7, 8, 9, or 10 times), or an AAAGG sequence (SEQ ID NO:132) that may be repeated from 1-10 times.
[0742] 61. The T-Cell-MP-epitope conjugate of any preceding aspect, wherein the scaffold polypeptide sequence comprises an independently selected non-interspecific sequence or interspecific sequence.
[0743] 62. The T-Cell-MP-epitope conjugate of aspect 61, wherein the interspecific and non-interspecific sequences are selected from the group consisting of: Ig heavy chain constant regions (Ig Fc e.g., CH2-CH3); collectin polypeptides, coiled-coil domains, leucine-zipper domains; Fos polypeptides; Jun polypeptides; Ig CH1; Ig C_{L} κ; Ig C_{L} λ; knob-in-hole without disulfide (KiH); knob-in hole with a stabilizing disulfide bond (KiHs-s); HA-TF; ZW-1; 7.8.60; DD-KK; EW-RVT; EW-RVTs-s; and A107 sequences.
[0744] 63. The T-Cell-MP-epitope conjugate of any preceding aspect complexed to form a duplex T-Cell-MP-epitope conjugate or other higher order T-Cell-MP-epitope conjugate comprising at least a first T-Cell-MP-epitope conjugate and a second T-Cell-MP-epitope conjugate of any of aspects 1-62, wherein:
   [0745] (i) the first T-Cell-MP-epitope conjugate comprises a first β2M polypeptide sequence; a first class I MHC-H polypeptide sequence; and a first scaffold polypeptide; and
   [0746] (ii) the second T-Cell-MP-epitope conjugate comprises a second β2M polypeptide sequence; a second class I MHC-H polypeptide sequence; and a second scaffold polypeptide; and wherein the first and second T-Cell-MP-epitope conjugates associate by binding interactions between the first and second scaffold polypeptides that optionally includes at least one or at least two interchain covalent bonds (e.g., one or two disulfide bonds). See e.g., the duplexes in FIGS. 9 to 11.
[0747] 64. The T-Cell-MP-epitope conjugate or duplex T-Cell-MP-epitope conjugate of aspect 63, wherein the first and second scaffold polypeptides comprise a pair of non-Ig polypeptide sequences.
[0748] 65. The duplex T-Cell-MP-epitope conjugate of aspect 64, wherein the pair of non-Ig polypeptide sequences are non-interspecific polypeptide sequences (e.g., non-interspecific coiled-coil or leucine zipper sequences).
[0749] 66. The duplex T-Cell-MP-epitope conjugate of aspect 64, wherein the pair of non-Ig polypeptide sequences are a pair of interspecific polypeptide sequences selected from interspecific coiled-coil or leucine zipper sequences or a Fos protein polypeptide sequence that pairs with a Jun protein polypeptide sequence.
[0750] 67. The duplex T-Cell-MP-epitope conjugate of aspect 63, wherein the first and second scaffold polypeptides comprise a pair of Ig polypeptide sequences.
[0751] 68. The duplex T-Cell-MP-epitope conjugate of aspect 67, wherein the pair of Ig polypeptide sequences comprise one or more substitutions that reduce the binding with Ig Fc receptors and/or complement C1q protein relative to a T-Cell-MP where the Ig polypeptide sequence is unsubstituted.
[0752] 69. The duplex T-Cell-MP-epitope conjugate of aspect 67 or 68, wherein the first and second scaffold polypeptides comprise a pair of non-interspecific Ig polypeptide aa sequences (e.g., an Ig CH2-CH3 containing aa sequence such as an Ig Fc polypeptide aa sequence).
[0753] 70. The duplex T-Cell-MP-epitope conjugate of aspect 69, wherein the pair of non-interspecific Ig polypeptide sequence comprises a human IgA Fc, IgD Fc, or IgE Fc polypeptide sequence comprising an aa sequence having at least about 90% (e.g., at least about 95%, at least about 98%, or at least about 99%) or 100% aa sequence identity to at least 175 (e.g., at least 200, or at least 210) contiguous aas, or all aas of an aa sequence of an Ig Fc region depicted in FIGS. 2A-2C.
[0754] 71. The duplex T-Cell-MP-epitope conjugate of aspect 69, wherein the pair of non-interspecific Ig polypeptide sequence comprises a human IgG1 Fc, IgG2 Fc IgG3 Fc or IgG4 Fc polypeptide sequence comprising an aa sequence having at least about 90% (e.g., at least about 95%, at least about 98%, or at least about 99%) or 100% aa sequence identity to at least 175 (e.g., at least 200, or at least 210) contiguous aas, or all aas of an aa sequence of an Ig Fc region depicted in FIGS. 2D-2G. For example, the pair of non-interspecific Ig polypeptide sequences may comprise a human IgG1 Fc, IgG2 Fc IgG3 Fc or IgG4 Fc aa sequence having at least about 95% or at least about 98% aa sequence identity to at least 200 contiguous aas of an Ig Fc region depicted in FIGS. 2D-2G.
[0755] 72. The r duplex T-Cell-MP-epitope conjugate of any of aspects 69 or 70, wherein the pair of non-interspecific Ig polypeptide sequence comprises a human IgG1 Fc polypeptide sequence comprising an aa sequence having at least about 90% (e.g., at least about 95%, at least about 98%, or at least about 99%) or 100% aa sequence identity to at least 175 (e.g., at least 200, or at least 210) contiguous aas, or all aas of an aa sequence of the wild-type (wt.) Ig Fc sequence depicted in FIG. 2D. For example, the pair of non-interspecific Ig polypeptide sequences may comprise a human IgG1 Fc aa sequence having at least about 95% or at least about 98% aa sequence identity to at least 200 contiguous aas of the wild-type (wt.) Ig Fc sequence depicted in FIG. 2D (SEQ ID NO: 4).
[0756] 73. The duplex T-Cell-MP-epitope conjugate of aspect 72, wherein the pair of non-interspecific Ig polypeptide sequences comprises polypeptide having at least one substitution at L234, L235, G236, G237, P238, S239, D270, N297, K322, P329, and/or P331 (respectively, aas L14, L15, G16, G17, P18, S19, D50, N77, K102, P109, and P111 of the wt. IgG1 aa sequence in FIG. 2D) or another substitution (e.g., a corresponding substitution) that reduces binding to the Fc A receptor and/or the C1q protein relative to the same sequence without the substitutions.
[0757] 74. The duplex T-Cell-MP-epitope conjugate of aspect 72, wherein the pair of non-interspecific Ig polypeptide sequences comprises a substitution at P331 and: (i) a substitution of N297 (e.g., N297A); (ii) a substitution of any of aas 234 to 239; (iii) a substitution at L234; (iv) a substitution at L235; (v) a substitution at L234 and L235 (e.g., an L234A and L235A or “LALA” substitution); (vi) a substitution of P331; or (vii) substitutions of D270, K322, and/or P329; substitutions at L234 and/or L235 (e.g., L234F, L235E, and P331S substitutions).
[0758] 75. The duplex or higher order T-Cell-MP-epitope conjugate of aspect 63, wherein the first and second scaffold polypeptide sequences comprise an IgM heavy chain constant region.
[0759] 76. The duplex T-Cell-MP-epitope conjugate of aspect 63, wherein the first and second scaffold polypeptides comprise a pair of interspecific Ig polypeptide sequences.
[0760] 77. The T-Cell-MP-epitope conjugate or duplex T-Cell-MP-epitope conjugate of aspect 76, wherein the pair of interspecific Ig sequences is selected from the group consisting of Ig heavy chain constant regions (Ig Fc CH2-CH3) comprising: knob-in-hole without disulfide (KiH), knob-in hole with a stabilizing disulfide bond (KiHs-s), HA-TF, ZW-1, 7.8.60, DD-KK, EW-RVT, EW-RVTs-s, or A107 sequence pairs; or an Ig CH1 paired with an Ig C_{L} κ or Ig C_{L} λ.
[0761] 78. The duplex T-Cell-MP-epitope conjugate of aspect 76, wherein the pair of interspecific Ig sequences comprise KIH or a KIHs-s polypeptide sequences.
[0762] 79. The duplex T-Cell-MP-epitope conjugate of aspect 76, wherein the pair of interspecific Ig sequences comprise EW-RVT or EW-RVTs-s polypeptide sequences.
[0763] 80. The T-Cell-MP-epitope conjugate of aspect 76, wherein the pair of interspecific Ig sequences comprise HA-TF, ZW-1, 7.8.60, DD-KK, or A107 polypeptide sequences.
[0764] 81. The duplex T-Cell-MP-epitope conjugate of any of aspects 76-80, further comprising one or more substitutions that reduce binding to the Fc A receptor and/or the C1q protein (e.g., substitutions at IgG1 aa L234 and/or L235, or K322) relative to the same sequence without the substitutions.
[0765] 82. The T-Cell-MP-epitope conjugate of any of aspects 76-81, further comprising one or more substitutions that limit complement activation (e.g., reduce binding to the complement C1q protein such as by substitutions at IgG D270, N297, K322, P329, and/or P331) relative to the same sequence without the substitutions.
[0766] 83. The duplex T-Cell-MP-epitope conjugate of any of aspects 76-82, wherein the pair of interspecific Ig polypeptide sequences comprise a human IgG1 Fc sequence comprising an aa sequence having at least about 90% (e.g., at least about 95%, at least about 98%, or at least about 99%) aa sequence identity to at least 175 (e.g., at least 200, or at least 210) contiguous aas of the wt. Ig Gg1 Fc sequence in FIG. 2D. For example, the pair of interspecific Ig polypeptide sequences may comprise a human IgG1 Fc sequence having at least about 90% or at least about 95% aa sequence identity to at least 200 contiguous aas of the wild-type (wt.) Ig Fc sequence depicted in FIG. 2D (SEQ ID NO:4).
[0767] 84. The duplex T-Cell-MP-epitope conjugate of aspect 83, wherein the interspecific Ig polypeptide sequence comprises one or more Ig Fc regions, comprising at least one substitution at L234, L235, G236, G237, P238, S239, D270, N297, K322, P329, and/or P331 (respectively, aas L14, L15, G16, G17, P18, S19, D50, N77, K102, P109, and P111 of the wt. IgG1 aa sequence in FIG. 2D) or another substitution (e.g., a corresponding substitution) that reduces binding to the Fc A receptor and/or the C1q protein relative to the same sequence without the substitutions.
[0768] 85. The duplex T-Cell-MP-epitope conjugate of aspect 83, comprising a substitution at P331 (e.g., L234F, L235E, and P331S substitutions) and: (i) a substitution of N297 (e.g., N297A); (ii) a substitution of any of aas 234 to 239; (iii) a substitution at L234; (iv) a substitution of L235; (v) a substitution of L234 and L235 (e.g., an L234A and L235A or “LALA” substitution); (vi) a substitution of P331; or (vii) substitutions of D270, K322, and/or P329; substitutions at L234 and/or L235.
[0769] 86. The T-Cell-MP-epitope conjugate, or the duplex or higher order T-Cell-MP-epitope conjugate of any of aspects 1-85, comprising at least one (e.g., at least two, at least three, or at least four) wt. MOD and/or at least one (e.g., at least two, at least three, or at least four) variant MOD polypeptide sequences selected independently from the group consisting of: IL-1, IL-2, IL-4, IL-6, IL-7, IL-10, IL-12, IL-15, IL-17, IL-21, IL-23, CD7, CD30L, CD40, CD70, CD80, (B7-1), CD83, CD86 (B7-2), HVEM (CD270), ILT3 (Ig-like transcript 3), IL T4 (Ig-like transcript 4), Fas ligand (FasL), ICAM (intercellular adhesion molecule), ICOS-L (inducible costimulatory ligand), JAG1 (CD339), lymphotoxin beta receptor, 3/TR6, OX40L (CD252), PD-L1, PD-L2, TGF-β1, TGF-β2, TGF-β3, 4-1BBL and anti-CD28 polypeptide sequences.
[0770] 87. The T-Cell-MP-epitope conjugate or duplex T-Cell-MP-epitope conjugate of any preceding aspect, comprising at least one (e.g., at least two, at least three, or at least four) wt. MOD and/or at least one (e.g., at least two, or at least three) variant MOD polypeptide sequence selected independently from the group consisting of: 4-1BBL, anti-CD28, PD-L1, IL-2, CD80, CD86, OX40L (CD252), Fas ligand (FasL), ICOS-L, ICAM, CD30L, CD40, CD83, HVEM (CD270), JAG1 (CD339), CD70, CD80, CD86, TGF-β1, TGF-β2, and TGF-β3 polypeptide sequences.
[0771] 88. The T-Cell-MP-epitope conjugate or duplex T-Cell-MP-epitope conjugate of any preceding aspect, comprising at least one (e.g., at least two, at least three, or at least four) independently selected wt. MOD or at least one (e.g., at least two, at least three, or at least four) variant MOD polypeptide sequence selected independently from the group consisting of 4-1BBL, PD-L1, IL-2, CD80, CD86, FasL wt. MOD or variant MOD polypeptide sequences and anti-CD28. For example, the T-Cell-MP-epitope conjugate or duplex T-Cell-MP-epitope conjugate may comprise at least one wt. IL-2 MOD and/or variant IL-2 MOD polypeptide sequence, and at least one wt. CD80, wt. CD86, variant CD80 or variant CD86 polypeptide sequence.
[0772] 89. The T-Cell-MP-epitope conjugate or duplex T-Cell-MP-epitope conjugate of any preceding aspect, comprising at least one (e.g., at least two) independently selected wt. IL-2 or at least one (e.g., at least two, at least three, or at least four) independently selected variant IL-2 MOD (e.g., comprising a H16A or T substitution and a F42A or T substitution, such as H16A and F42A substitutions) polypeptide sequence, or at least one pair of wt. IL-2 MOD polypeptide sequences in tandem or at least one pair of variant IL-2 MOD polypeptide sequences in tandem.
[0773] 90. The T-Cell-MP-epitope conjugate or duplex T-Cell-MP-epitope conjugate of any preceding aspect comprising at least one (e.g., at least two, at least three, or at least four) independently selected wt. or variant: (i) CD80; (ii) CD86 MOD polypeptide sequence; (iii) PD-L1 MOD polypeptide sequence; and/or (iv) FasL MOD polypeptide sequence.
[0774] 91. The T-Cell-MP-epitope conjugate or duplex T-Cell-MP-epitope conjugate of any preceding aspect, comprising an intrachain disulfide bond between a cysteine substituted into the carboxyl end portion of the α1 helix and a cysteine in the amino end portion of the α2-1 helix (e.g., substituted in the amino end portion of the α2-1 helix) of the MHC-H polypeptide sequence.
[0775] 92. The T-Cell-MP-epitope conjugate or duplex T-Cell-MP-epitope conjugate of any preceding aspect, comprising an intrachain disulfide bond between a cysteine substituted into the carboxyl end portion of the α1 helix at position 84 and a cysteine in the amino end portion of the α2-1 helix at position 139 of the MHC-H polypeptide sequence;
   [0776] wherein when the MHC-H polypeptide has a sequence having at least 90% or at least 95% sequence identity to SEQ ID NO:84, the five residue clusters amino and carboxyl to position 84 (denoted aac1 and aac2, respectively) and, the five residue clusters amino and carboxyl to position 139 (denoted aac3, and aac4 respectively) may each be substituted with 1 to 5 independently selected naturally occurring aas, and the five residue clusters amino and carboxyl to position 236 (denoted aac5 and aac6, respectively) may each be substituted with 1 to 5 independently selected naturally occurring aas, and the sequence identity is calculated excluding the aas of the five residue clusters.
[0777] 93. The T-Cell-MP-epitope conjugate or duplex T-Cell-MP-epitope conjugate of aspect 92, wherein each of the amino acids of aac1 to aac6 may each be substituted with independently selected naturally occurring aa other than proline.
[0778] 94. The T-Cell-MP-epitope conjugate or duplex T-Cell-MP-epitope conjugate of aspect 92, wherein the carboxyl end portion of the α1 helix comprises a first sequence CYNQSE (see e.g., position 84 and aac2 in FIG. 3I) and the amino end portion of the α2-1 helix of the MHC-H polypeptide sequence comprises a second sequence D (M/T) CAQ (e.g., the sequence spanning aac3 and aac4 in FIG. 3I), and wherein the intrachain disulfide bond is formed between the cysteines in the first and second sequences.
[0779] 95. The duplex T-Cell-MP-epitope conjugate of any of aspects 63-94, wherein the first T-Cell-MP-epitope conjugate and the second T-Cell-MP-epitope conjugate are not linked by disulfide bonds.
[0780] 96. The duplex T-Cell-MP-epitope conjugate of any of aspects 63-94, wherein the first T-Cell-MP-epitope conjugate and the second T-Cell-MP-epitope conjugate are covalently linked by at least one (e.g., at least two) disulfide bond(s).
[0781] 97. The duplex T-Cell-MP-epitope conjugate of aspect 96, wherein the first T-Cell-MP-epitope conjugate and the second T-Cell-MP-epitope conjugate are covalently linked by at least one (e.g., at least two) disulfide bond(s) between the scaffold polypeptide sequences of the first T-Cell-MP-epitope conjugate and the second T-Cell-MP-epitope conjugate.
[0782] 98. The duplex T-Cell-MP-epitope conjugate of any of aspects 63-97, wherein the sequences of at least one of (e.g., both) the first T-Cell-MP-epitope conjugate and the second T-Cell-MP-epitope conjugate do not comprise an Ig CH1 domain polypeptide sequence.
[0783] 99. The duplex T-Cell-MP-epitope conjugate of any of aspects 63-75 and 86-98, wherein the first T-Cell-MP-epitope conjugate and the second T-Cell-MP-epitope conjugate are identical, and the duplex T-Cell-MP-epitope conjugate is a homodimer. See, e.g., FIGS. 6, 7, and 9 structure C.
[0784] 100. The duplex T-Cell-MP-epitope conjugate of aspect 99, wherein the first T-Cell-MP-epitope conjugate and the second T-Cell-MP-epitope conjugate comprise at least one (e.g., at least two, or at least three) wt. MOD or variant MOD polypeptide sequence selected independently from the group consisting of: IL-1, IL-2, IL-4, IL-6, IL-7, IL-10, IL-12, IL-15, IL-17, IL-21, IL-23, CD7, CD30L, CD40, CD70, CD80, (B7-1), CD83, CD86 (B7-2), HVEM (CD270), ILT3 (Ig-like transcript 3), ILT4 (Ig-like transcript 4), Fas ligand (FasL), ICAM (intercellular adhesion molecule), ICOS-L (inducible costimulatory ligand), JAG1 (CD339), lymphotoxin beta receptor, 3/TR6, OX40L (CD252), PD-L1, PD-L2, TGF-β1, TGF-β2, TGF-β3, 4-1BBL polypeptide sequences and anti-CD28.
[0785] 101. The duplex T-Cell-MP-epitope conjugate of aspect 99, wherein the first T-Cell-MP-epitope conjugate and a second T-Cell-MP-epitope conjugate comprise at least one (e.g., at least two, or at least three) wt. MOD or variant MOD polypeptide sequence selected independently from the group consisting of: 4-1BBL, PD-L1, IL-2, CD80, CD86, FasL wt. MOD or variant MOD polypeptide sequences, and anti-CD28. For example, the T-Cell-MP-epitope conjugate or duplex T-Cell-MP-epitope conjugate may comprise at least one IL-2 wt. MOD or variant MOD polypeptide sequence, and at least one CD80, CD86, variant CD80 or variant CD86 polypeptide sequence.
[0786] 102. The duplex T-Cell-MP-epitope conjugate of aspect 99, wherein the first T-Cell-MP-epitope conjugate and a second T-Cell-MP-epitope conjugate comprise at least one IL-2 wt. MOD or variant MOD (e.g., comprising a H16A or T substitution and a F42A substitution) polypeptide sequence, or at least one pair of IL-2 wt. MOD or variant MOD polypeptide sequences in tandem.
[0787] 103. The duplex T-Cell-MP-epitope conjugate of any of aspects 99-102, wherein the first T-Cell-MP-epitope conjugate and the second T-Cell-MP-epitope conjugate further comprise at least one: (i) CD80 and/or CD86 wt. MOD or variant MOD polypeptide sequence; (ii) at least one PD-L1 wt. MOD or variant MOD polypeptide sequence; and/or (iii) at least one FasL wt. MOD or variant MOD polypeptide sequence.
[0788] 104. The duplex T-Cell-MP-epitope conjugate of any of aspects 63-64 and 76-98, wherein the scaffold polypeptides of the first T-Cell-MP and the second T-Cell-MP-epitope conjugate are a pair of interspecific polypeptide sequences, and the duplex T-Cell-MP-epitope conjugate is a heterodimer. See, e.g., FIG. 10 structure C.
[0789] 105. The duplex T-Cell-MP-epitope conjugate of aspect 104, wherein at least one (e.g., both) of the first T-Cell-MP-epitope conjugate and the second T-Cell-MP-epitope conjugate comprises at least one wt. MOD or variant MOD polypeptide sequence selected independently from the group consisting of: IL-1, IL-2, IL-4, IL-6, IL-7, IL-10, IL-12, IL-15, IL-17, IL-21, IL-23, CD7, CD30L, CD40, CD70, CD80 (B7-1), CD83, CD86 (B7-2), HVEM (CD270), ILT3 (Ig-like transcript 3), ILT4 (Ig-like transcript 4), Fas ligand (FasL), ICAM (intercellular adhesion molecule), ICOS-L (inducible costimulatory ligand), JAG1 (CD339), lymphotoxin beta receptor, 3/TR6, OX40L (CD252), PD-L1, PD-L2, TGF-β1, TGF-β2, TGF-β3, anti-CD28, and 4-1BBL polypeptide sequences.
[0790] 106. The duplex T-Cell-MP-epitope conjugate of aspect 104, wherein at least one (e.g., both) of the first T-Cell-MP-epitope conjugate and the second T-Cell-MP-epitope conjugate comprises at least one wt. MOD or variant MOD polypeptide sequence selected independently from the group consisting of: 4-1BBL, anti-CD28, PD-L1, IL-2, CD80, CD86, and FasL wt. MOD or variant MOD polypeptide sequences. For example, the duplex T-Cell-MP-epitope conjugate may comprise at least one IL-2 wt. MOD or variant MOD polypeptide sequence, and at least one anti-CD28, CD80, CD86, variant CD80 or variant CD86 polypeptide sequence.
[0791] 107. The duplex T-Cell-MP-epitope conjugate of aspect 104, wherein at least one (e.g., both) of the first T-Cell-MP-epitope conjugate and the second T-Cell-MP-epitope conjugate comprises at least one independently selected IL-2 wt. MOD or variant IL-2 MOD polypeptide sequence, or at least one pair of IL-2 wt. MOD polypeptide sequences in tandem or variant IL-2 MOD polypeptide sequences in tandem.
[0792] 108. The duplex T-Cell-MP-epitope conjugate of aspect 104, wherein at least one (e.g., both) of the first T-Cell-MP-epitope conjugate and the second T-Cell-MP-epitope conjugate comprises at least one independently selected: (i) CD80 and/or CD86 wt. MOD or variant MOD polypeptide sequence; (ii) at least one PD-L1 wt. MOD or variant MOD polypeptide sequence; and/or (iii) at least one FasL wt. MOD or variant MOD polypeptide sequence.
[0793] 109. The duplex T-Cell-MP-epitope conjugate of aspect 104, wherein at least one (e.g., both) of the first T-Cell-MP-epitope conjugate and the second T-Cell-MP-epitope conjugate comprises at least one CD80 and/or CD86 wt. MOD or variant MOD polypeptide sequence.
[0794] 110. The duplex T-Cell-MP-epitope conjugate of aspect 104, wherein at least one (e.g., both) of the first T-Cell-MP-epitope conjugate and the second T-Cell-MP-epitope conjugate comprises at least one PD-L1 wt. MOD or variant MOD polypeptide sequence.
[0795] 111. The duplex T-Cell-MP-epitope conjugate of any of aspects 104-110, wherein: (i) the first T-Cell-MP-epitope conjugate and the second T-Cell-MP-epitope conjugate do not comprise the same MODs; (ii) the first T-Cell-MP-epitope conjugate and the second T-Cell-MP-epitope conjugate do not comprise the same number of MODs; or (iii) the MODs are placed in different locations of the first T-Cell-MP-epitope conjugate and the second T-Cell-MP-epitope conjugate.
[0796] 112. The T-Cell-MP-epitope conjugate of any of aspects 1-65 or 86-94, complexed to form triplex T-Cell-MP-epitope conjugates, quadraplex T-Cell-MP-epitope conjugates, pentaplex T-Cell-MP-epitope conjugates, or hexaplex T-Cell-MP-epitopes.
[0797] 113. The T-Cell-MP-epitope conjugate or duplex T-Cell-MP-epitope conjugate of any of aspects 1-112, wherein each chemical conjugation site is jointly or independently selected from: a) amino acid chemical conjugation sites; b) non-natural amino acids and/or selenocysteines; c) peptide sequences that act as an enzymatic modification sequence (e.g., a sulfatase motif); d) carbohydrate or oligosaccharide moieties; and/or e) IgG nucleotide binding sites.
[0798] 114. The T-Cell-MP-epitope conjugate or duplex T-Cell-MP-epitope conjugate of any of aspects 1-113, wherein at least one (e.g., two or more) chemical conjugation site comprises an enzymatic modification sequence.
[0799] 115. The T-Cell-MP-epitope conjugate or duplex T-Cell-MP-epitope conjugate of any of aspects 1-114, wherein at least one (e.g., two or more) chemical conjugation site comprises a sulfatase motif.
[0800] 116. The T-Cell-MP-epitope conjugate or duplex T-Cell-MP-epitope conjugate of aspect 115, wherein the sulfatase motif comprises the sequence X1Z1X2Z2X3Z3 (SEQ ID NO:66) wherein:
   [0801] Z1 is cysteine or serine; Z2 is either a proline or alanine residue; Z3 is a basic amino acid (arginine, lysine, or histidine, usually lysine), or an aliphatic amino acid (alanine, glycine, leucine, valine, isoleucine, or proline, usually A, G, L, V, or I);
   [0802] X1 is present or absent and, when present, can be any amino acid, though usually an aliphatic amino acid, a sulfur-containing amino acid, or a polar, uncharged amino acid (i.e., other than an aromatic amino acid or a charged amino acid), usually L, M, V, S or T, more usually L, M, S or V, with the proviso that, when the sulfatase motif is at the N-terminus of the target polypeptide, X1 is present; and
   [0803] X2 and X3 independently can be any amino acid, though usually an aliphatic amino acid, a polar, uncharged amino acid, or a sulfur containing amino acid (i.e., other than an aromatic amino acid or a charged amino acid), usually S, T, A, V, G or C, more usually S, T, A, V or G.
[0804] 117. The T-Cell-MP-epitope conjugate or duplex T-Cell-MP-epitope conjugate of aspect 116, wherein at least one Z1 residue has been converted into an fGly amino acid residue.
[0805] 118. The T-Cell-MP-epitope conjugate or duplex T-Cell-MP-epitope conjugate of any of aspects 1-114, wherein: at least one (e.g., or more, two) of the chemical conjugation sites comprises a Sortase A enzyme site (e.g., comprising the amino acid sequence LP (X5) TG/A (SEQ ID NO:69), or LPETGG (SEQ ID NO:74) positioned at the C-terminus of at least one (e.g., both) T-Cell-MP polypeptides; or at least one of the chemical conjugation sites is a Sortase A enzyme site comprising an oligoglycine (e.g., (G) 2, 3, 4, or 5) or an oligo alanine (e.g., (A) 2, 3, 4, or 5) at the amino terminus of at least one of or both the first or second T-Cell-MP polypeptides.
[0806] 119. The T-Cell-MP-epitope conjugate or duplex T-Cell-MP-epitope conjugate of any of aspects 1-114, wherein at least one (e.g., two or more) chemical conjugation site comprises a transglutaminase site (e.g., selected from the group consisting of: LQG, LLQGG (SEQ ID NO:76), LLQG (SEQ ID NO:77), LSLSQG (SEQ ID NO:78), and LLQLQG (SEQ ID NO: 79).
[0807] 120. The T-Cell-MP-epitope conjugate or duplex T-Cell-MP-epitope conjugate of any of aspects 1-114, wherein at least one (e.g., two or more) chemical conjugation site comprises a selenocysteine, or an amino acid sequence containing one or more independently selected non-natural amino acids.
[0808] 121. The T-Cell-MP-epitope conjugate or duplex T-Cell-MP-epitope conjugate of aspect 120, wherein at least one of the one or more non-natural amino acids (e.g., two or more) is selected from the group consisting of para-acetylphenylalanine, para-azido phenylalanine and propynyl-tyrosine.
[0809] 122. The T-Cell-MP-epitope conjugate or duplex T-Cell-MP-epitope conjugate of any of aspects 1-113, wherein at least one (e.g., two or more) chemical conjugation site comprises a carbohydrate, monosaccharide, disaccharide and/or oligosaccharide.
[0810] 123. The T-Cell-MP-epitope conjugate or duplex T-Cell-MP-epitope conjugate of any of aspects 1-113, wherein at least one (e.g., two or more) chemical conjugation site comprises one or more IgG nucleotide binding sites.
[0811] 124. The T-Cell-MP-epitope conjugate or duplex T-Cell-MP-epitope conjugate of any of aspects 1-113, wherein at least one (e.g., two or more) chemical conjugation site comprises an amino acid conjugation site (e.g., a cysteine provided in a T-Cell-MP-epitope conjugate by protein engineering of its sequence).
[0812] 125. The T-Cell-MP-epitope conjugate or duplex T-Cell-MP-epitope conjugate of aspect 124, wherein the at least one chemical conjugation site comprises a sulfhydryl group of a cysteine provided in a T-Cell-MP-epitope conjugate polypeptide sequence, or in the polypeptide sequence of each of the first T-Cell-MP-epitope conjugate and second T-Cell-MP-epitope conjugate of a duplex T-Cell-MP-epitope conjugate (e.g., provided in a T-Cell-MP-epitope conjugate by protein engineering of the polypeptide sequence(s)).
[0813] 126. The T-Cell-MP-epitope conjugate or duplex T-Cell-MP-epitope conjugate of aspect 124, wherein the at least one (e.g., two or more) chemical conjugation site comprises a selenol group of selenocysteine and/or a sulfhydryl group of a cysteine provided in a T-Cell-MP-epitope conjugate polypeptide sequence (e.g., provided in a T-Cell-MP-epitope conjugate by protein engineering of its polypeptide sequence).
[0814] 127. The T-Cell-MP or duplex T-Cell-MP-epitope conjugate of aspect 124, wherein the at least one (e.g., two or more) chemical conjugation site comprises the epsilon amino group of a lysine provided in a T-Cell-MP-epitope conjugate polypeptide sequence (e.g., provided in a T-Cell-MP-epitope conjugate by protein engineering of its polypeptide sequence).
[0815] 128. The T-Cell-MP-epitope conjugate or duplex T-Cell-MP-epitope conjugate of any of aspects 1-127, wherein each chemical conjugation site (e.g., for the conjugation of an epitope) present in the T-Cell-MP-epitope conjugate or duplexed T-Cell-MP-epitope conjugate is selected to be the same (e.g., the chemical conjugation sites of both the first and second T-Cell-MP in a duplex T-Cell-MP-epitope conjugate are the sulfhydryl of a cysteine provided by protein engineering of the polypeptide sequences and undergo a common conjugation reaction).
[0816] 129. The T-Cell-MP-epitope conjugate or duplex T-Cell-MP-epitope conjugate of any of aspects 1-128, wherein a chemical conjugation site (e.g., for the conjugation of an epitope) is located at or within 25 aa of the N-terminus or C-terminus of a T-Cell-MP, or if present, at the N-terminus or C-terminus or within a linker located at the N-terminus or C-terminus of the T-Cell-MP.
[0817] 130. The T-Cell-MP-epitope conjugate or duplex T-Cell-MP-epitope conjugate of any of aspects 1-128, wherein a chemical conjugation site is located in a linker of the T-Cell-MP (e.g., an L1-L6 linker).
[0818] 131. The T-Cell-MP-epitope conjugate or duplex T-Cell-MP-epitope conjugate of any of aspects 1-128, wherein the one or more chemical conjugation site(s) (e.g., for the conjugation of an epitope) is/are located in the MHC-H polypeptide sequence, the β2M polypeptide sequence (e.g., a Q2C, E44C, E50C, E77C, V85C, S88C, K91C, or D98C substitution in a mature β2M polypeptide sequence), or a linker sequence joining the MHC-H and β2M polypeptide sequences (the L3 linker).
[0819] 132. The T-Cell-MP-epitope conjugate or duplex T-Cell-MP-epitope conjugate of any of aspects 1-128, wherein the one or more chemical conjugation sites (e.g., for the conjugation of an epitope) is/are located in a linker sequence joining the MHC-H and β2M polypeptide sequences (the L3 linker).
[0820] 133. The T-Cell-MP-epitope conjugate or duplex T-Cell-MP-epitope conjugate of aspect 132, where the one or more chemical conjugation site is/are sulfhydryl of a cysteine present in the linker sequence joining the MHC-H and β2M polypeptide sequences.
[0821] 134. The T-Cell-MP-epitope conjugate or duplex T-Cell-MP-epitope conjugate of aspect 133, wherein the linker sequence joining the MHC-H and β2M polypeptide sequences further comprises a glycine, glycine and serine, alanine, alanine and serine, or alanine glycine and serine containing polypeptide sequence.
[0822] 135. The T-Cell-MP-epitope conjugate or duplex T-Cell-MP-epitope conjugate of aspect 133, wherein the linker sequence joining the MHC-H and β2M polypeptide sequences comprises the polypeptide sequence GGGS (SEQ ID NO:122) or GGGGS (SEQ ID NO: 130).
[0823] 136. The T-Cell-MP-epitope conjugate or duplex T-Cell-MP-epitope conjugate of aspect 133, wherein the linker sequence joining the MHC-H and β2M polypeptide sequences comprises a polypeptide sequence selected from the group consisting of: GCGGS (G4S) (SEQ ID NO: 156) where the G4S unit may be repeated from 1 to 10 times (e.g., repeated 1, 2, 3, 4, 5, 6, 7, 8, 9, or 10 times), GCGASGGGGSGGGGS (SEQ ID NO:157), GCGGSGGGGSGGGGSGGGGS (SEQ ID NO: 158) and GCGGSGGGGSGGGGS SEQ ID NO:159).
[0824] 137. The T-Cell-MP-epitope conjugate or duplex T-Cell-MP-epitope conjugate of any of aspects 131-136, wherein the linker sequence joining the MHC-H and β2M polypeptide sequences (the L3 linker) comprises from 10 to 50 amino acids.
[0825] 138. The T-Cell-MP-epitope conjugate or duplex T-Cell-MP-epitope conjugate of any of aspects 131-136, wherein the linker sequence joining the MHC-H and β2M polypeptide sequences (the L3 linker) comprises from 15 to 50 amino acids.
[0826] 139. The T-Cell-MP-epitope conjugate or duplex T-Cell-MP-epitope conjugate of any of aspects 1-128, wherein the one or more chemical conjugation site (e.g., for the conjugation of an epitope) is/are located in the MHC-H polypeptide sequence, which has at least 95% (e.g., at least 97% or at least 98%) or 100%) aa sequence identity to at least 200, or 225 contiguous aas of a MHC-H sequence shown in FIGS. 3A-3I or an HLA allele recited in FIG. 3A to FIG. 3H.
[0827] 140. The T-Cell-MP-epitope conjugate or duplex T-Cell-MP-epitope conjugate of aspect 139, wherein the one or more chemical conjugation sites comprise a cysteine or selenocysteine.
[0828] 141. The T-Cell-MP-epitope conjugate or duplex T-Cell-MP-epitope conjugate of aspect 110, wherein at least one cysteine or selenocysteine chemical conjugation site is located at position 2, 5, 7, 59, 84, 116, 139, 167, 168, 170, or 171 of a MHC-H polypeptide with the numbering of the corresponding aas conducted by alignment (e.g. using Clustal Omega Version 1.2.2 using default parameters) as in FIGS. 3D-3I.
[0829] 142. The T-Cell-MP-epitope conjugate or duplex T-Cell-MP-epitope conjugate of any of aspects 1-128, wherein a chemical conjugation site (e.g., for the conjugation of an epitope) is located in the β2M polypeptide sequence, which has at least 90% (e.g., at least 95%, at least 98%, or at least 99%) or 100% aa sequence identity to at least 80 (e.g., at least 90, at least 95, at least 97, or at least 98) or all contiguous aas of a mature β2M polypeptide sequence provided in FIG. 4 (e.g., the sequences shown in FIG. 4 starting at aa 21 and ending at their C-terminus, such as aas 21-119 of NCBI accession number NP_004039.1 SEQ ID NO:61).
[0830] 143. The T-Cell-MP-epitope conjugate or duplex T-Cell-MP-epitope conjugate of aspect 142, wherein the one or more chemical conjugation sites is/are located between aas 35-55 (e.g., 40 to 50) of the β2M polypeptide sequence, and the β2M polypeptide sequence has 1 to 15 or 1 to 10 aa substitutions.
[0831] 144. The T-Cell-MP-epitope conjugate or duplex T-Cell-MP-epitope conjugate of aspect 142, wherein at least one cysteine or selenocysteine chemical conjugation site is located at position 2, 44, 50, 77, 85, 88, 91, or 98 (aas 22, 64, 70, 97, 105, 108, 111, or 118 of the β2M sequences as shown in FIG. 4, e.g., the human β2M sequence of NP_004039.1, SEQ ID NO:61 or the corresponding positions in the other β2M sequences). For example, the T-Cell-MP-epitope conjugate or duplex T-Cell-MP-epitope conjugate may comprise a cysteine located at position 44 as an E44C substitution in NP_004039.1, SEQ ID NO:61.
[0832] 145. The T-Cell-MP-epitope conjugate or duplex T-Cell-MP-epitope conjugate of any of aspects 1-128, wherein a chemical conjugation site (e.g., for the conjugation of an epitope) is located in the β2M polypeptide sequence, which has 1 to 15 or 1-10 (e.g., 1, 2, 3, 4, 5, 6, 7, 8, 9, 10, 11, 12, 13, 14, or 15) aa deletions, insertions and/or changes compared with a mature β2M polypeptide set forth in FIG. 4 (starting at aa 21 and ending at its C-terminus).
[0833] 146. The T-Cell-MP-epitope conjugate or duplex T-Cell-MP-epitope conjugate of any of aspects 142-145, wherein the chemical conjugation site is a cysteine (e.g., the sulfhydryl of a cysteine).
[0834] 147. The T-Cell-MP-epitope conjugate or duplex T-Cell-MP-epitope conjugate of any of aspects 142-145, wherein the β2M polypeptide sequence is a mature human β2M sequence of FIG. 4.
[0835] 148. The duplex T-Cell-MP-epitope conjugate of any of aspects 63-147, wherein at least the first T-Cell-MP-epitope conjugate polypeptide sequence, and optionally the first and second T-Cell-MP-epitope conjugate polypeptide sequences comprise, from in the N-terminal to C-terminal direction:
   [0836] (i) one or more independently selected MOD polypeptide sequences optionally joined by L1 linkers;
   [0837] (ii) an L2 linker polypeptide sequence;
   [0838] (iii) a β2M polypeptide sequence;
   [0839] (iv) an L3 linker polypeptide sequence comprising from 10 to 50 or 10 to 30 (e.g., from 10 to 20, from 10 to 25, from 15 to 25, from 20 to 30, from 25 to 35, from 25 to 50, from 30 to 35, from 35 to 45, or from 40 to 50) amino acids;
   [0840] (v) a class I MHC-H polypeptide sequence comprising cysteines substituted at positions 84 and 139 (see FIGS. 3E-3H, e.g., Y84C and A139C substitutions) and forming a intrachain disulfide bond;
   [0841] (vi) an L4 linker polypeptide sequence;
   [0842] (vii) an interspecific or non-interspecific Ig Fc scaffold sequence;
   [0843] (viii) an optional L5 linker polypeptide sequence; and
   [0844] (ix) optionally one or more independently selected MOD polypeptide sequences (e.g., two or more MOD polypeptide sequences, such as in tandem, optionally joined by L6 linkers);
   [0845] wherein at least one of the β2M polypeptide sequence, the L3 linker polypeptide sequence, or the MHC-H polypeptide sequence comprises a chemical conjugation site (e.g., added by protein engineering) to which a peptide presenting an epitope (e.g., a peptide presenting a coronavirus epitope or an HLA-E restricted non-coronavirus epitope such as a peptide, phosphopeptide, glycopeptide, lipopeptide or carbohydrate epitope) is directly or indirectly (through a linker) covalently bound; and
   [0846] wherein the first and second T-Cell-MP-epitope conjugate are covalently linked through at least one disulfide bond between their Ig Fc scaffold sequences.
[0847] 149. The duplex T-Cell-MP-epitope conjugate of any of aspects 63-147, wherein at least the first T-Cell-MP-epitope conjugate polypeptide sequence, and optionally the first and second T-Cell-MP-epitope conjugate polypeptide sequences comprise (e.g., in the N-terminal to C-terminal direction):
   [0848] (i) optionally one or more independently selected MOD polypeptide sequences optionally joined by L1 linkers;
   [0849] (ii) an optional L2 linker polypeptide sequence;
   [0850] (iii) a β2M polypeptide sequence;
   [0851] (iv) an L3 linker polypeptide sequence comprising from 10 to 50 amino acids;
   [0852] (v) a class I MHC-H polypeptide sequence comprising cysteines substituted at positions 84 and 139 (see FIGS. 3E-3H, e.g., Y84C and A139C substitutions) and forming a disulfide bond;
   [0853] (vi) an L4 linker polypeptide sequence;
   [0854] (vii) an interspecific or non-interspecific Ig Fc scaffold sequence;
   [0855] (viii) an L5 linker polypeptide sequence; and
   [0856] (ix) one or more independently selected MOD polypeptide sequences joined by L6 linker polypeptides;
   [0857] wherein at least one of the β2M polypeptide sequence, the L3 linker polypeptide sequence, or the MHC-H polypeptide sequence comprises a chemical conjugation site (e.g., added by protein engineering) to which a peptide presenting an epitope (e.g., a peptide presenting a coronavirus epitope or an HLA-E restricted non-coronavirus epitope such as a peptide, phosphopeptide, glycopeptide, lipopeptide or carbohydrate epitope) is directly or indirectly (e.g., through a linker) covalently bound; and
   [0858] wherein the first and second T-Cell-MPs are covalently linked through at least one disulfide bond between their Ig Fc scaffold sequences.
[0859] 150. The duplex T-Cell-MP-epitope conjugate of aspects 148 or 149, wherein the chemical conjugation site(s) of the first and second T-Cell-MP-epitope conjugate polypeptides is within the L3 linker.
[0860] 151. The duplex T-Cell-MP-epitope conjugate of aspect 150, wherein the chemical conjugation site(s) of the first and second T-Cell-MP-epitope conjugate polypeptides is the sulfhydryl of a cysteine present in the L3 linker comprises, consists essentially of consists predominantly of (based on the number of aas), or consists of a glycine, serine and/or alanine residues.
[0861] 152. The duplex T-Cell-MP-epitope conjugate of aspects 148 or 149, wherein the chemical conjugation site(s) of the first and second T-Cell-MP-epitope conjugate polypeptides is within the β2M polypeptide sequence (e.g., a mature β2M polypeptide sequence or portion thereof having at least 90% (e.g., at least 95%, at least 98%, or at least 99%) or 100% aa sequence identity to at least 85 (e.g., at least 90, at least 95, at least 97, or at least 98) contiguous aas or all contiguous aas of a β2M polypeptide sequence provided in FIG. 4).
[0862] 153. The duplex T-Cell-MP-epitope conjugate of aspect 152, wherein the chemical conjugation site(s) of the first and second T-Cell-MP-epitope conjugate polypeptides is the sulfhydryl of a cysteine provided at the β2M polypeptide sequence.
[0863] 154. The duplex T-Cell-MP-epitope conjugate of aspect 153, wherein the chemical conjugation site(s) of the first and second T-Cell-MP-epitope conjugate polypeptides is the sulfhydryl of a cysteine provided at the β2M polypeptide at position 44 of a mature β2M polypeptide sequence provided in FIG. 4 (e.g., an E44C or K44C substitution in a mature β2M polypeptide sequence or portion thereof having at least 90% (e.g., at least 95%, at least 98%, or at least 99%) or 100% aa sequence identity to at least 70 (e.g., at least at least 80, at least 90, at least 95, at least 97, or at least 98) or all contiguous aas of a β2M polypeptide sequence provided in FIG. 4).
[0864] 155. The duplex T-Cell-MP-epitope conjugate of any of aspects 148-154, wherein the one or more MOD polypeptide sequences comprise at least one (e.g., two or more) wt. IL-2 or variant IL-2 sequence (e.g., comprising a H16A or T substitution and a F42A substitution).
[0865] 156. The duplex T-Cell-MP-epitope conjugate of any of aspects 148-155, wherein the one or more MOD polypeptide sequences comprise at least one wt. or variant CD80 or CD86 sequence.
[0866] 157. The duplex T-Cell-MP-epitope conjugate of any of aspects 148-156, wherein the one or more MOD polypeptide sequences comprise at least one wt. or variant PD-L1 sequence.
[0867] 158. The duplex T-Cell-MP-epitope conjugate of any of aspects 148-157, wherein the one or more MOD polypeptide sequences comprise at least one wt. or variant 4-1BBL or PD-L1 sequence.
[0868] 159. The duplex T-Cell-MP-epitope conjugate of any of aspects 148-158, wherein:
   [0869] (i) the Ig Fc scaffold is non-interspecific scaffold polypeptide and the duplex is a homodimer comprising identical first and second T-Cell-MP-epitope conjugate polypeptides; or
   [0870] (ii) the first and second scaffold polypeptides are an interspecific pair of Ig Fc scaffold polypeptides (e.g., a KIH or KIHs-s pair), and the duplex is a heterodimer.
[0871] 160. The duplex T-Cell-MP-epitope conjugate of aspect 159, wherein the first and second scaffold polypeptides are an interspecific pair of Ig Fc scaffold polypeptides, and the first T-Cell-MP-epitope conjugate polypeptide sequence comprises at least one independently selected MOD polypeptide sequence that is not present in the second T-Cell-MP-epitope conjugate polypeptide sequence.
[0872] 161. The T-Cell-MP-epitope conjugate or duplex T-Cell-MP of any preceding aspect, wherein at least one T-Cell-MP is conjugated to a peptide, phosphopeptide, glycopeptide, lipopeptide epitope.
[0873] 162. The T-Cell-MP-epitope conjugate or duplex T-Cell-MP-epitope conjugate of any preceding aspect, wherein the coronavirus epitope presented by the peptide is a SARS-CoV2 coronavirus epitope or an HLA-E restricted non-coronavirus epitope.
[0874] 163. The T-Cell-MP-epitope conjugate or duplex T-Cell-MP-epitope conjugate of any of aspects 131-132, wherein the peptide presenting an epitope is a peptide, glycopeptide, phosphopeptide, or lipopeptide that comprises from 4 aas (aa) to 25 aa (e.g., the peptide can have a length of from 5 aa to 10 aa, from 6 aa to 12 aa, from 8 aa to 15 aa, from 15 aa to 20 aa, or from 20 aa to 25 aa).
[0875] 164. The T-Cell-MP-epitope conjugate or duplex T-Cell-MP-epitope conjugate of aspect 161 to 164, wherein the peptide epitope is from 6 aas to 12 aas, from 8 aas to 15 aas or from 15 aas to 25 aas.
[0876] 165. The T-Cell-MP-epitope conjugate or duplex T-Cell-MP-epitope conjugate of any of aspects 1-34 or 42-164, wherein the peptide presenting a coronavirus epitope comprises 6 to 25 contiguous amino acids of a coronavirus protein selected from the group consisting of: surface glycoprotein; membrane protein; nucleocapsid phosphoprotein; open reading frame (ORF) 1b protein; ORF3a protein; ORF6 protein; ORF7a protein; ORF8 protein; ORF10 protein; envelope protein; membrane glycoprotein; nonstructural protein (nsp) one (nsp1); nsp2; nsp4; nsp6; nsp7, nsp8, nsp9, nsp10; nsp14; nsp15; nsp16; nucleocapsid phosphoprotein; papain-like cysteine protease (Plpro); 3C-like protease (3C_{L}); RNA-dependent RNA polymerase (Rdpol) and helicase (Hel).
[0877] 166. The T-Cell-MP-epitope conjugate or duplex T-Cell-MP-epitope conjugate of any of aspects 161-165, wherein the peptide presenting a coronavirus epitope comprises 8 to 15, or 15 to 20, contiguous amino acids of any one of the peptides set forth in FIG. 21 and/or Table 2.
[0878] 167. The T-Cell-MP-epitope conjugate or duplex T-Cell-MP-epitope conjugate of any of aspects 161-165, wherein the peptide presenting a coronavirus epitope comprises 8 to 15, or 15 to 20, contiguous amino acids of any one of the peptides set forth in FIG. 22 and/or Table 3.
[0879] 168. The T-Cell-MP-epitope conjugate or duplex T-Cell-MP-epitope conjugate of any of aspects 161-165, wherein the peptide presenting a coronavirus epitope comprises the aa sequence of a peptide set forth in Table 3a.
[0880] 169. The T-Cell-MP-epitope conjugate or duplex T-Cell-MP-epitope conjugate of any of aspects 161-168, wherein the chemical conjugation site is the sulfhydryl of a cysteine and the coronavirus epitope is a SARS-CoV2 coronavirus epitope.
[0881] 170. The T-Cell-MP-epitope conjugate or duplex T-Cell-MP-epitope conjugate of aspect 169, where the cysteine is located in the β2M polypeptide sequence or the L3 linker sequence joining the MHC-H and β2M polypeptide sequences.
[0882] 171. The T-Cell-MP-epitope conjugate or duplex T-Cell-MP-epitope conjugate of aspect 170, where the cysteine is located in the β2M polypeptide sequence.
[0883] 172. The T-Cell-MP-epitope conjugate or duplex T-Cell-MP-epitope conjugate of aspect 171, wherein in the cysteine is a cysteine substituted at position 2, 44, 50, 77, 85, 88, 91, or 98 of a mature β2M polypeptide sequence (e.g., a Q2C, E44C, E50C, E77C, V85C, S88C, K91C, or D98C substitution in GenBank accession NP_004039.1, SEQ ID NO:61 numbered lacking its signal sequence).
[0884] 173. The T-Cell-MP-epitope conjugate or duplex T-Cell-MP-epitope conjugate of aspect 172, wherein in the cysteine is a cysteine substituted at position 44 of a mature β2M polypeptide sequence (e.g., an E44C substitution in GenBank accession NP_004039.1, SEQ ID NO:61 numbered lacking its signal sequence).
[0885] 174. The T-Cell-MP-epitope conjugate or duplex T-Cell-MP-epitope conjugate of any of aspects 169-173, wherein the epitope is covalently linked directly or indirectly (through a linker) to the sulfhydryl of the cysteine, through a bond formed by reaction with a maleimide group (e.g., a bond to a pyrrolidone-2,5-dione group resulting from addition of the sulfhydryl to the maleimide group, see e.g., FIGS. 8-11).
[0886] 175. The T-Cell-MP-epitope conjugate or duplex T-Cell-MP-epitope conjugate of any of aspects 161-174, wherein the MHC-H polypeptide sequence has at least 90% or 95% sequence identity to at least 200 contiguous aas of an MHC-H chain polypeptide selected from the group consisting of: HLA-A*0101 (SEQ ID NO:24), HLA-A*0201 (SEQ ID NO:27), HLA-A*0301 (SEQ ID NO:35), HLA-A*1101 (SEQ ID NO:32), HLA-A*2301 (SEQ ID NO: 36), HLA-A*2402 (SEQ ID NO:33), HLA-A*2407 (SEQ ID NO:37), HLA-A*3303 (SEQ ID NO:34), HLA-A*3401 (SEQ ID NO:38), HLA-B*0702 (SEQ ID NO:25), HLA-B*0801 (SEQ ID NO:41), HLA-B*1501 (SEQ ID NO: 2041), HLA-B*1502 (SEQ ID NO:42), HLA-B*2705 (SEQ ID NO:2042), HLA-B*3501 (SEQ ID NO:80), HLA-B*3802 (SEQ ID NO:43), HLA-B*4001 (SEQ ID NO:44), HLA-B*4402 (SEQ ID NO:81), HLA-B*4403 (SEQ ID NO:82), HLA-B*4601 (SEQ ID NO:45), HLA-B*5301 (SEQ ID NO:46), HLA-B*5801 (SEQ ID NO:83), HLA-C*0102, (SEQ ID NO:48), HLA-C*0303 (SEQ ID NO:49), HLA-C*0304 (SEQ ID NO:50), HLA-C*0401 (SEQ ID NO:51), HLA-C*0602 (SEQ ID NO:52), HLA-C*0701 (SEQ ID NO:53), HLA-C*0702 (SEQ ID NO:54), HLA-C*0801 (SEQ ID NO:55), and HLA-C*1502 (SEQ ID NO:56, an HLA-E polypeptide (SEQ ID NO: 58), an HLA-F polypeptide (SEQ ID NO: 59), and an HLA-G polypeptide (SEQ ID NO:60).
[0887] 176. The T-Cell-MP-epitope conjugate or duplex T-Cell-MP-epitope conjugate of aspect 175, wherein the MHC-H polypeptide sequence has at least 90% or at least 95% sequence identity to at least 200 contiguous aas of an MHC-H chain polypeptide selected from the group consisting of: wherein the MHC-H polypeptide sequence has at least 90% sequence identity to at least 200 contiguous aas of an MHC-H chain polypeptide selected from the group consisting of: HLA-A*0201 (SEQ ID NO:27), HLA-A*2402 (SEQ ID NO:33), HLA-A*1101 (SEQ ID NO: 32), HLA-B*4001 (SEQ ID NO:44), and HLA-B*5801 (SEQ ID NO:83).
[0888] 177. The T-Cell-MP-epitope conjugate or duplex T-Cell-MP-epitope conjugate of any of aspects 161-174, wherein the MHC-H polypeptide sequence has at least 90% sequence identity to at least 200 contiguous aas of an MHC-H chain polypeptide selected from the group consisting of: HLA-A allele consensus sequence SEQ ID NO: 39, HLA-B allele consensus sequence SEQ ID NO:47, and HLA-C allele consensus sequence SEQ ID NO: 57.
[0889] 178. The T-Cell-MP-epitope conjugate, duplex T-Cell-MP-epitope conjugate, or higher order T-cell-MP-epitope conjugate of any preceding aspect further comprising: at least one (e.g., at least two) additional polypeptide, each of which is independently selected; and/or at least one (e.g., at least two) covalently attached payload, each of which is independently selected.
[0890] 179. The T-Cell-MP-epitope conjugate or duplex T-Cell-MP-epitope conjugate of aspect 178, wherein the at least one additional peptide comprises an epitope tag or an affinity domain.
[0891] 180. The T-Cell-MP-epitope conjugate or duplex T-Cell-MP-epitope conjugate of aspect 178 or 179, wherein the at least one payload comprises a therapeutic agent, antiviral agent, diagnostic agent, or label.
[0892] 181. The T-Cell-MP-epitope conjugate or duplex T-Cell-MP-epitope conjugate of any of aspects 178-180, wherein the at least one payload comprises a therapeutic agent selected from a nonsteroidal anti-inflammatory drug (e.g., Cox-1 and/or Cox-2 inhibitors such as celecoxib, diclofenac, diflunisal, etodolac, ibuprofen, indomethacin, ketoprofen, or naproxen), or a steroidal anti-inflammatory drug (e.g., cortisone, dexamethasone, hydrocortisone, ethamethasoneb, fludrocortisone, methylprednisolone, prednisone, prednisolone, or triamcinolone).
[0893] 182. The T-Cell-MP-epitope conjugate or duplex T-Cell-MP-epitope conjugate of any of aspects 178-180, wherein the at least one payload comprises an antiviral agent.
[0894] 183. The T-Cell-MP-epitope conjugate or duplex T-Cell-MP-epitope conjugate of any of aspects 178-180, wherein the at least one payload comprises a therapeutic agent selected from the group consisting of pyronaridine (pyronaridine-artesunate), quinacrine, mitoxantrone, raloxifene, piceatannol, sunitinib, BNTX and Tilorone.
[0895] 184. The T-Cell-MP-epitope conjugate or duplex T-Cell-MP-epitope conjugate of any of aspects 178-180, wherein the at least one payload comprises Remdesivir or molnupiravir.
[0896] 185. The T-Cell-MP-epitope conjugate of any of aspects 178-184, wherein the at least one additional polypeptide comprises a targeting sequence.
[0897] 186. The duplex T-Cell-MP-epitope conjugate of any of aspects 178-184, wherein (i) the first T-Cell-MP-epitope conjugate comprises at least one independently selected additional polypeptide comprising a targeting sequence, and (ii) the second T-Cell-MP-epitope conjugate comprise at least one independently selected additional polypeptide comprising a targeting sequence.
[0898] 187. The duplex T-Cell-MP-epitope conjugate of aspect 186, wherein the at least one targeting sequence of the first T-Cell-MP-epitope conjugate and the at least one targeting sequence of the second T-Cell-MP-epitope conjugate are the same or different, and when different the targeting sequences may bind to the same or different targets (e.g., identical antigenic determinates or non-identical antigens or antigenic determinates). See, e.g., FIG. 18.
[0899] 188. The T-Cell-MP-epitope conjugate or duplex T-Cell-MP-epitope conjugate of any of aspect 185-187, wherein at least one, or each, targeting sequence binds to an independently selected coronavirus protein (e.g., a protein of FIGS. 20A to 20J), or an independently selected coronavirus peptide set forth in Table 2, Table 3, Table 3a, FIG. 21, or FIG. 22).
[0900] 189. The T-Cell-MP-epitope conjugate or duplex T-Cell-MP-epitope conjugate of aspect 188, wherein at least one, or each, targeting sequence binds to coronavirus spike (surface glycoprotein) protein (e.g., at an ACE receptor sequence or a sequence other than the ACE receptor sequence).
[0901] 190. The T-Cell-MP-epitope conjugate or duplex T-Cell-MP-epitope conjugate of any of aspect 188-189 wherein the targeting sequences are (i) independently selected antibody sequence (e.g., scFV, nanobody, or diabodies), or (ii) TCR or single chain TCR aa sequences is directed against a coronavirus peptide epitope-MHC complex (coronavirus peptide epitope-HLA complex).
[0902] 191. The T-Cell-MP-epitope conjugate or duplex T-Cell-MP-epitope conjugate of any of aspect 188-189 wherein the targeting sequence is a TCR or single chain TCR is directed against a coronavirus peptide epitope-MHC complex (coronavirus peptide epitope-HLA complex).
[0903] 192. The duplex T-Cell-MP-epitope conjugate of any of aspects 186-191, wherein the first T-Cell-MP-epitope conjugate and the second T-Cell-MP-epitope conjugate comprise targeting sequences binding to different targets (e.g., two scFV sequences, two nanobodies, two diabodies, or a bispecific antibody, targeting two different coronavirus epitopes or coronavirus epitope-MHC complexes).
[0904] 193. The duplex T-Cell-MP-epitope conjugate of aspect 192, wherein the different targets are located on different proteins or on the same protein.
[0905] 194. The T-Cell-MP-epitope conjugate or duplex T-Cell-MP-epitope conjugate of any of aspects 185-187, wherein at least one (e.g., at least two) or each targeting sequence is an independently selected Cancer Targeting Polypeptide (CTP) (such molecules are forms of redirected T-Cell-MP-epitope conjugates). The CTPs do not bind to a coronavirus epitope, and specifically do not bind to the coronavirus epitope presented by the T-Cell-MP-epitope conjugate or duplex T-Cell-MP-epitope conjugate.
[0906] 195. The T-Cell-MP-epitope conjugate or duplex T-Cell-MP-epitope conjugate of aspect 194, wherein the least one (e.g., at least two) or each CTP is a T cell receptor (TCR), or a TCR polypeptide sequence (e.g., a TCR beta chain or a TCR single-chain T-cell receptor (scTCR)).
[0907] 196. The T-Cell-MP-epitope conjugate or duplex T-Cell-MP-epitope conjugate of aspect 195, wherein the least one (e.g., at least two) or each CTP comprises an antibody aa sequence (e.g., a sequence of one or more antibody complementarity determining regions).
[0908] 197. The T-Cell-MP-epitope conjugate or duplex T-Cell-MP-epitope conjugate of aspect 196, wherein each antibody is a chimeric antibody, humanized antibody, diabody, bi-specific antibody, or multi-specific antibody.
[0909] 198. The T-Cell-MP-epitope conjugate or duplex T-Cell-MP-epitope conjugate of aspect 196, wherein each antibody is an antibody fragment selected from an Fab, F(ab′)₂, Fv, scFv, or Fd fragment.
[0910] 199. The T-Cell-MP-epitope conjugate or duplex T-Cell-MP-epitope conjugate of aspect 196, wherein each antibody is selected from single-chain antibodies, single chain camelid (e.g., llama) antibodies, single domain antibodies (dAb), single domain heavy chain antibodies, single domain light chain antibodies, nanobodies, and fusion proteins comprising an antigen-binding (also referred to herein as antigen binding) portion of an antibody and a non-antibody protein.
[0911] 200. The T-Cell-MP-epitope conjugate or duplex T-Cell-MP-epitope conjugate of aspect 196, wherein each antibody is a nanobody or scFv.
[0912] 201. The T-Cell-MP-epitope conjugate or duplex T-Cell-MP-epitope conjugate of any of aspects 194-200, wherein each CTP binds to an antigen present on the surface of a neoplasm (e.g., benign, precancerous, or malignant neoplasms).
[0913] 202. The T-Cell-MP-epitope conjugate or duplex T-Cell-MP-epitope conjugate of any of aspects 194-201, where each CTP is directed against (e.g., binds to) an independently selected cancer associated antigen or antigenic determinant (e.g., binds to different antigenic determinates on the same or different antigens), and may be the same or different.
[0914] 203. The T-Cell-MP-epitope conjugate or duplex T-Cell-MP-epitope conjugate of aspect 202, wherein each cancer associated antigen is selected independently from the group consisting of: 17-1A-antigen, alpha-fetoprotein (AFP), alpha-actinin-4, A3, antigen specific for A33 antibody, ART-4, B7, Ba 733, BAGE, bcl-2, bcl-6, BCMA, BrE3-antigen, CA125, CAMEL, CAP-1, carbonic anhydrase IX (CAIX), CASP-8/m, CCL19, CCL21, CD1, CD1a, CD2, CD3, CD4, CD5, CD8, CD11A, CD14, CD15, CD16, CD18, CD19, CD20, CD21, CD22, CD23, CD25, CD29, CD30, CD32b, CD33, CD37, CD38, CD40, CD40L, CD44, CD45, CD46, CD52, CD54, CD55, CD59, CD64, CD66a-e, CD67, CD70, CD70L, CD74, CD79a, CD79b, CD80, CD83, CD95, CD123, CD126, CD132, CD133, CD138, CD147, CD154, CD171, CDC27, CDK-4/m, CDKN2A, CEA, CEACAM5, CEACAM6, a claudin, a complement factor, colon-specific antigen-p (CSAp), c-Met, CTLA-4, CXCR4, CXCR7, CXCL12, DAM, Dickkopf-related protein (DKK), ED-B fibronectin, epidermal growth factor receptor (EGFR), EGFRvIII, EGP-1 (TROP-2), EGP-2, ELF2-M, Ep-CAM, EphA2, EphA3, fibroblast activation protein (FAP), fibroblast growth factor (FGF), Flt-1, Flt-3, folate binding protein, folate receptor, G250 antigen, gangliosides (such as GC2, GD3 and GM2), GAGE, GD2, gp100, GPC3, GRO-13, HLA-DR, HM1.24, human chorionic gonadotropin (HCG) and its subunits, HER2, HER3, HMGB-1, hypoxia inducible factor (HIF-1), HIF-1a, HSP70-2M, HST-2, la, IFN-gamma, IFN-alpha, IFN-beta, IFN-X, IL-4R, IL-6R, IL-13R, IL 13Ralpha2, IL-15R, IL-17R, IL-18R, IL-2, IL-6, IL-8, IL-12, IL-15, IL-17, IL-18, IL-23, IL-25, ILGF, ILGF-1R, insulin-like growth factor-1 (IGF-1), IGF-1R, integrin αVβ3, integrin α5β1, KC4-antigen, killer-cell immunoglobulin-like receptor (KIR), Kras, KS-1-antigen, KS1-4, LDR/FUT, Le^{gamma}, macrophage migration inhibitory factor (MIF), a MAGE (e.g., MAGE A1, MAGE A2, MAGE A2B, MAGE A3, MAGE A4, MAGE A6, MAGE A8, MAGE A9, MAGE A9B, MAGE A10, MAGE A11, MAGE A12, MAGE C1, MAGE C2 in Human Genome Nomenclature Committee or “HGNC” abbreviations), MART-1, MART-2, mCRP, MCP-1, melanoma glycoprotein, mesothelin, MIP-1A, MIP-1B, MIF, mucins (e.g., MUC1, MUC2, MUC3, MUC4, MUC5ac, MUC13, MUC16, MUM-1/2 and MUM-3), NCA66, NCA95, NCA90, Nectin-4, NY-ESO-1, NY-ESO-2 (also known as Cancer/testis antigen 2 or L antigen family member 1), PAM4 antigen, pancreatic cancer mucin, PD-1, PD-L1, PD-1 receptor, placental growth factor, p53, PLAGL2, prostatic acid phosphatase, PSA, PRAME, PSMA, P1GF, RSS, RANTES, SAGE, 5100, survivin, survivin-2B, T101, TAC, TAG-72, tenascin, Thomson-Friedenreich antigens, Tn antigen, TNF-alpha, tumor necrosis antigens, TRAG-3, TRAIL receptors, vascular endothelial growth factor (VEGF), VEGF receptor (VEGFR) and WT-1.
[0915] 204. The T-Cell-MP-epitope conjugate or duplex T-Cell-MP-epitope conjugate of aspect 202, wherein each cancer associated antigen is selected independently from the group consisting of: NY-ESO (New York Esophageal Squamous Cell Carcinoma 1), melanoma antigen recognized by T cells or “MART”, HPV (human papilloma virus) E6, BCMA (B-cell maturation antigen), CD123, CD133, CD171, CD19, CD20, CD22, CD30, CD33, CD38, CD138, CEA (carcinoembryonic antigen), EGFR (epidermal growth factor receptor), EGFRvIII (epidermal growth factor receptor variant III), EpCAM (epithelial cell adhesion molecule), EphA2 (ephrin type-A receptor 2), disialoganglioside GD2, GPC3 (glypican-3), HER2, IL 13Ralpha2 (Interleukin 13 receptor subunit alpha-2), LeY (a difucosylated type 2 blood group-related antigen), a melanoma-associated antigen(s) or “MAGE” (e.g., MAGE A3 or MAGE A4), melanoma glycoprotein, mesothelin, a mucin (e.g., mucin 1 or “MUC1”), MUC16 (mucin-16), myelin, NKG2D (Natural Killer Group 2D) ligands, PSMA (prostate specific membrane antigen), and ROR1 (type I receptor tyrosine kinase-like orphan receptor)
[0916] 205. The T-Cell-MP-epitope conjugate or duplex T-Cell-MP-epitope conjugate of aspect 202, wherein each cancer associated antigen is selected independently from the group consisting of: CAIX, cadherins, CEA, c-MET, CTLA-4, EGFR family members, EpCAM, EphA3, FAP, folate-binding protein, FR-alpha, gangliosides (such as GC2, GD3 and GM2), HER2, HER3, IGF-1R, integrin αVβ3, integrin α5β1, Le^{gamma}, Liv1, mesothelin, mucins, NaPi2b, PD-1, PD-L1, PD-1 receptor, pgA33, PSMA, RANKL, ROR1, TAG-72, tenascin, TRAILR1, TRAILR2, VEGF, VEGFR
[0917] 206. The T-Cell-MP-epitope conjugate or duplex T-Cell-MP-epitope conjugate of aspect 202, wherein each cancer associated antigen is selected independently from the group consisting of: MAGE A1, MAGE A2, MAGE A2B, MAGE A3, MAGE A4, MAGE A6, MAGE A8, MAGE A9, MAGE A9B, MAGE A10, MAGE A11, MAGE A12, MAGE C1, MAGE C2.
[0918] 207. The T-Cell-MP-epitope conjugate or duplex T-Cell-MP-epitope conjugate of aspect 202, wherein each cancer associated antigen is selected independently from MAGE A3 and MAGE A4.
[0919] 208. The T-Cell-MP-epitope conjugate or duplex T-Cell-MP-epitope conjugate of aspect 202, wherein each cancer associated antigen is an NY-ESO-1 antigen.
[0920] 209. The T-Cell-MP-epitope conjugate or duplex T-Cell-MP-epitope conjugate of aspect 195, wherein the T cell receptor (TCR), or a TCR polypeptide sequence binds to an epitope of a cancer associated antigen (e.g., complexed with an MHC).
[0921] 210. The T-Cell-MP-epitope conjugate or duplex T-Cell-MP-epitope conjugate of aspect 209, wherein the cancer associated antigen is selected from the group consisting of: MUC1, LMP2, epidermal growth factor receptor (EGFR) vIII, HER-2/neu, a melanoma associated antigen (“MAGE”), MAGE A1, MAGE A3, MAGE A4, p53, a mutant p53, NY-ESO-1, folate hydrolase (prostate-specific membrane antigen; PSMA), carcinoembryonic antigen (CEA), a claudin (e.g., claudin-1, claudin-10, claudin-18 (e.g., claudin-18, isoform 2), Nectin-4, melanoma antigen recognized by T-cells (melanA/MART1), Ras, gp100, proteinase3 (PR1), bcr-abl, tyrosinase, survivin, prostate specific antigen (PSA), hTERT, a sarcoma translocation breakpoint polypeptide, a synovial sarcoma X (SSX) breakpoint polypeptide, EphA2, an acid phosphatase, prostate (PAP), melanoma inhibitor of apoptosis (ML-IAP), an epithelial cell adhesion molecule (EpCAM), an ERG (TMPRSS2 ETS fusion), NA17, a paired-box-3 (PAX3) polypeptide, an anaplastic lymphoma kinase (ALK), an androgen receptor, cyclin B1, an N-myc proto-oncogene (MYCN), a Ras homolog gene family member C (RhoC), a tyrosinase-related protein-2 (TRP-2), a mesothelin, a prostate stem cell antigen (PSCA), cytochrome P450 1B1 (CYP1B1), placenta-specific protein 1 (PLAC1), BORIS, an ETV6-AML, a breast cancer antigen, NY-BR-1, a regulator of G-protein signaling (RGS5), squamous cell carcinoma antigen recognized by T-cells (SART3), carbonic anhydrase IX, paired box-5 (PAX5), OY-TES1, sperm protein 17, lymphocyte cell-specific protein-tyrosine kinase (LCK), high molecular weight melanoma associated antigen (HMW-MAA), A-kinase anchoring protein-4 (AKAP-4), synovial sarcoma X breakpoint 2 (SSX2), aX antigen family member 1 (XAGE1), B7 homolog 3, a legumain (e.g., LGMN1), a tyrosine kinase with Ig and EGF homology domains-2 (Tie-2; also known as angiopoietin-1 receptor), a P antigen family member 4 (PAGE4), vascular endothelial growth factor receptor 2 (VEGF2), MAD-CT-1, fibroblast activation protein (FAP), PDGFB, a MAD-CT-2, Fos-related antigen-1; a human papilloma virus (“HPV”) antigen; alpha-feto protein (“AFP”) antigen; and Wilms tumor-1 (“WT1”) antigen.
[0922] 211. The T-Cell-MP-epitope conjugate or duplex T-Cell-MP-epitope conjugate of any of aspects 194-210, wherein the targeting sequence (e.g., CTP) is fused to (part of) the T-Cell-MP-epitope conjugate, or in the case of a duplex T-Cell-MP-epitope conjugate is fused to (part of) at least one (e.g., both the first and second) T-Cell-MP-epitope conjugate polypeptide ((e.g., translated as part of the T-Cell-MP-epitope conjugate sequence(s)).
[0923] 212. The T-Cell-MP-epitope conjugate or duplex T-Cell-MP-epitope conjugate of any of aspects 194-210, wherein the targeting sequence (e.g., CTP) is covalently attached (e.g., by a bifunctional crosslinker) or non-covalently attached to a T-Cell-MP-epitope conjugate or duplex T-Cell-MP-epitope conjugate.
[0924] 213. A method of treatment or prophylaxis of a coronavirus infection or condition associated with coronavirus infection comprising:
   [0925] (i) administering to a patient or subject (e.g., a patient in need thereof) an effective amount of one or more T-Cell-MP-epitope conjugates or one or more duplex T-Cell-MP-epitope conjugates or other higher order complexes of T-Cell-MP-epitope conjugates of any of aspects 1-193; or
   [0926] (ii) contacting a cell or tissue in vitro or in vivo with one or more T-Cell-MP-epitope conjugates or one or more duplex T-Cell-MP-epitope conjugates or other higher order complexes of T-Cell-MP-epitope conjugates according to any of aspects 1-193 and administering the cell, tissue, or progeny thereof to a patient or subject (e.g., a patient in need thereof);
   [0927] wherein the coronavirus infection or condition associated with coronavirus infection includes, but not limited to, primary coronavirus infections, secondary coronavirus infections, and long COVID.
[0928] 214. A method of controlling a coronavirus infection or of reducing transmission of coronavirus comprising (i) administering to a patient or subject (e.g., a patient in need thereof) an effective amount of one or more T-Cell-MP-epitope conjugates or one or more duplex T-Cell-MP-epitope conjugates or other higher order complexes of T-Cell-MP-epitope conjugates of T-Cell-MP-epitope conjugates of any of aspects 1-193; or (ii) contacting a cell or tissue in vitro or in vivo with one or more T-Cell-MP-epitope conjugates or one or more duplex T-Cell-MP-epitope conjugates or other higher order complexes of T-Cell-MP-epitope conjugates of any of aspects 1-193, and administering the cell, tissue, or progeny thereof to a patient or subject (e.g., a patient in need thereof).
[0929] 215. The method of any of aspects 213-214, wherein the T-Cell-MP-epitope conjugate or duplex T-Cell-MP-epitope conjugate comprises at least one targeting sequence.
[0930] 216. The method of aspect 215, wherein the at least one targeting sequence is directed to a cell or tissue antigen (e.g., a lung tissue antigen).
[0931] 217. The method of aspect 215 wherein the at least one targeting sequence is an antibody (monoclonal antibody, scFv, or nanobody) specific for a coronavirus protein (e.g., a protein of any of FIGS. 20A to 20J) or single chain TCR directed to (specific for) a coronavirus peptide epitope-HLA complex.
[0932] 218. The method of aspect 217 wherein the at least one targeting sequence comprises an antibody (e.g., a scFv) or single chain TCR sequenced that is fused to a T-Cell-MP-epitope conjugate, or is attached (covalently or non-covalently) a T-Cell-MP-epitope conjugate (e.g., by a crosslinking agent).
[0933] 219. The method of any of aspects 215-218, wherein when the one or more T-Cell-MP-epitope conjugates, duplex T-Cell-MP-epitope conjugates, or other higher order complexes of T-Cell-MP-epitope conjugates comprises a MOD that stimulates CD8+ T cells, the administering may increase the number of CD8+ T cells and/or activity of CD8+ effector T cells specific for the coronavirus epitope presented by the one or more T-Cell-MP-epitope conjugates, duplex T-Cell-MP-epitope conjugates, or other higher order complexes of T-Cell-MP-epitope conjugates.
[0934] 220. The method of any of aspects 215-218, wherein when the one or more T-Cell-MP-epitope conjugates, duplex T-Cell-MP-epitope conjugates or other higher order complexes of T-Cell-MP-epitope conjugates comprises a peptide presenting an HLA-E restricted coronavirus epitope (e.g., VMPLSAPTL, SEQ ID NO:2058) or a peptide presenting HLA-E restricted non-coronavirus epitope (e.g., epitopes that bind and activate signaling through CD94/NKG2C receptors of NK cells and may increase NK cell activity). Alternatively, HLA-E restricted epitopes that have affinity for CD94/NKG2A receptors of NK cells may suppress NK cell activity).
[0935] 221. The method of any of aspects 213-220, wherein the one or more T-Cell-MP-epitope conjugates or duplex T-Cell-MP-epitope conjugates comprise an IL-2 or variant IL-2.
[0936] 222. The method of aspect 221, wherein the one or more T-Cell-MP-epitope conjugates or duplex T-Cell-MP-epitope conjugates comprise a variant IL-2 having substitutions at H16 and/or F42 (e.g., H16A or H16T and either F42A or F42T).
[0937] 223. The method of any of aspects 213-222, wherein administering to the patient or subject functions prophylactically (prevents infection or symptomatic infection e.g., requiring hospitalization) relative to a control population.
[0938] 224. The method of any of aspects 213-223, wherein administering to the patient or subject: functions to control a coronavirus infection (e.g., reduce disease severity, morbidity, mortality, or the amount of time until the patient/subject is free of detectable virus) relative a control population; or functions to reduce one or more symptoms associated with long COVID relative to a population having but untreated for long COVID.
[0939] 225. The method of any of aspects 213-223, wherein administering to the patient/subject functions to reduce viral load, shedding, and/or transmission of coronaviruses by infected individuals relative to a control population (e.g., of infected individuals).
[0940] 226. The method of any of aspects 213-223, wherein administering to the patient/subject functions to increase the number of T cells (e.g., cytotoxic T cells) specific for the epitope conjugated to the T-cell-MP-epitope conjugate or duplex T-cell-MP-epitope conjugate thereof relative to the level prior to administration or relative a control population.
[0941] 227. The method of any of aspects 223-226, wherein the control population is a population that did not receive the T-cell-MP-epitope conjugate, duplex T-Cell-MP-epitope conjugate or higher order complex of any thereof; and wherein the control population may be matched to the patient(s) or subject(s) by:
   [0942] (i) age, sex, immune disease, and country of residence;
   [0943] (ii) age, weight, sex, immune disease, country of residence, and smoking status; or
   [0944] (iii) age, weight, sex, immune disease, country of residence, cancer, cerebrovascular disease. Kidney disease, Chronic Obstructive Pulmonary Disease, (COPD), diabetes, coronary disease (heart failure, coronary artery disease, or cardiomyopathies), smoking, pregnancy, and/or asthma.
[0945] 228. The method of any of aspects 213-227, further comprising administering one or more additional therapeutic agents (e.g., antiviral and/or immunomodulatory agents).
[0946] 229. The method of aspect 228, wherein the one or more therapeutic agents are selected from the group consisting of: nucleotide analogs, nucleoside analogs, chloroquine or hydroxychloroquine, anti-HIV agents, interferon beta (e.g., interferon beta 1a), protease inhibitors (e.g., cinanserin, flavonoids, diarylheptanoids), type I interferons (IFNs), recombinant IFN (e.g., rIFNβ or rIFNγ), inhibitors of IL-6 receptors (e.g., tocilizumab), inhibitors of IL-6 (e.g., anti-IL-6 antibodies such as lenzilumab), NSAIDs, and glucocorticoids.
[0947] 230. The method of aspect 229, wherein the nucleotide or nucleoside analogs are selected from the group consisting of: remdesivir, molnupiravir, favipiravir, ribavirin and galidesivir.
[0948] 231. The method of aspect 229, wherein the anti-HIV agents are lopinavir or ritonavir.
[0949] 232. The method of any of aspects 213-231, further comprising administering one or more NSAIDs.
[0950] 233. The method of aspect 232, wherein the one or more NSAIDs are Cox-1 and/or Cox-2 inhibitors selected from the group consisting of celecoxib, diclofenac, diflunisal, etodolac, ibuprofen, indomethacin, ketoprofen, and naproxen.
[0951] 234. The method of any of aspects 213-233, further comprising administering one or more corticosteroids.
[0952] 235. The method of aspect 234, wherein the one or more corticosteroids are selected from the group consisting of cortisone, dexamethasone, hydrocortisone, ethamethasoneb, fludrocortisone, methylprednisolone, prednisone, prednisolone and triamcinolone.
[0953] 236. The method of any of aspects 213-235, further comprising administering one or more inhibitors of viral entry.
[0954] 237. The method of aspect 236, wherein the inhibitors of viral entry are selected from Tilorone, Mitoxantrone, Raloxifene, and Piceatannol, Sunitinib, and BNTX.
[0955] 238. The method of any of aspects 213-237, further comprising administering one or more agents selected from the group consisting of: pyronaridine, pyronaridine-artesunate, quinacrine.
[0956] 239. The method of any of aspects 213-238, further comprising administering one or more antibodies directed against SARS-CoV-2 spike protein selected from the group consisting of bamlanivimab, etesevimab, casirivimab, imdevimab.
[0957] 240. The method of aspect 239, wherein the one or more antibodies comprise a combination of bamlanivimab and etesevimab, or a combination of casirivimab plus imdevimab.
[0958] 241. A method of providing treatment or prophylaxis to a patient or subject (e.g., a patient or subject in need thereof) having, or suspected of having, or developing (e.g., in association with genetic propensity or family history) a neoplasm comprising:
   [0959] (i) administering to a patient or subject an effective amount of one or more T-Cell-MP-epitope conjugates, one or more duplex T-Cell-MP-epitope conjugates, or other higher order complexes of T-Cell-MP-epitope conjugates of any of aspects 185-187 or 194-212; or
   [0960] (ii) contacting a cell or tissue (e.g., a cell or tissue of the patient or subject) in vitro or in vivo with one or more T-Cell-MP-epitope conjugates or duplex T-Cell-MP-epitope conjugates of any of aspects 185-187 or 194-212 and administering the cell, tissue, or progeny thereof to a patient/subject (e.g., a patient in need thereof).
[0961] 242. The method of aspect 241, wherein the neoplasm is a benign or precancerous neoplasm.
[0962] 243. The method of aspect 241, wherein the neoplasm is a malignant neoplasm (cancerous neoplasm).
[0963] 244. The method of any of aspects 241-243, optionally comprising administering (prior to or concurrent with the any of the one or more T-Cell-MP-epitope conjugates, one or more duplex T-Cell-MP-epitope conjugates, or other higher order complexes of T-Cell-MP-epitope conjugates) one or more doses of an antigen presenting the coronavirus epitope (e.g., a protein, polypeptide, peptide, or other antigen such as a phosphopeptide or glycopeptide presenting the coronavirus epitope that is covalent bound to a chemical conjugation site in the T-Cell-MP-epitope conjugate and presented to T cells).
[0964] 245. The method of aspect 244, wherein administering the protein, polypeptide, peptide or other antigen increases the number of CD8+ T-Cells (e.g., the number of circulating CD8+ T-cells/ml of blood) specific of the coronavirus epitope covalently bound to the one or more T-Cell-MP-epitope conjugates, one or more duplex T-Cell-MP-epitope conjugates, or other higher order complexes of T-Cell-MP-epitope conjugates.
[0965] 246. The method of any of aspects 241-245, wherein the coronavirus epitope is an epitope of a Bat-SL-CoV, SARS-CoV, SARS-CoV-2 (Covid-19), or MERS-CoV.
[0966] 247. The method of any of aspects 241-245, wherein the coronavirus epitope is an epitope of a SARS-CoV or SARS-CoV-2 (Covid-19).
[0967] 248. The method of any of aspects 241-245, wherein the coronavirus epitope is an epitope of a SARS-CoV-2 (Covid-19) (e.g., the delta or omicron strain).
[0968] 249. The method of any of aspects 241-248, wherein the coronavirus epitope is an epitope of a surface glycoprotein (spike protein see FIG. 20J), a nucleocapsid protein (see FIG. 20F), or membrane glycoprotein (See FIG. 20D).
[0969] 250. The method of any of aspects 241-249, wherein the coronavirus epitope is an epitope of a surface glycoprotein (spike protein see FIG. 20J).
[0970] 251. The method of any of aspects 241-250, wherein the one or more T-Cell-MP-epitope conjugates or one or more duplex T-Cell-MP-epitope conjugates or other higher order complexes of T-Cell-MP-epitope conjugates comprise an independently selected targeting sequence (e.g., a CTP) as part of at least one (e.g., each) T-Cell-MP-epitope conjugate polypeptide (e.g., fused to at least one or both of the first T-Cell-MP-epitope conjugate or the second T-Cell-MP-epitope conjugate of a duplex T-Cell-MP-epitope conjugate).
[0971] 252. The method of any of aspects 241-250, wherein the one or more T-Cell-MP-epitope conjugates or one or more duplex T-Cell-MP-epitope conjugates or other higher order complexes of T-Cell-MP-epitope conjugates comprise a targeting sequence (e.g., a CTP) covalently or non-covalently attached to at least one or each T-Cell-MP-epitope conjugate (e.g., attached by a bifunctional crosslinker to at least one T-Cell-MP-epitope conjugate of a duplex T-Cell-MP-epitope conjugate).
[0972] 253. The method of any of aspects 251-252, wherein the MHC-H polypeptide sequence of the one or more T-Cell-MP-epitope conjugates, one or more duplex T-Cell-MP-epitope conjugates, or other higher order complexes of T-Cell-MP-epitope conjugates comprise is an HLA-E polypeptide sequence.
[0973] 254. The method of aspects 253, wherein the a peptide presenting a coronavirus epitope comprises the sequence VMPLSAPTL (SEQ ID NO:2058.
[0974] 255. The method of aspects 253, wherein the one or more T-Cell-MP-epitope conjugates or one or more duplex T-Cell-MP-epitope conjugates or other higher order complexes of T-Cell-MP-epitope conjugates are conjugate to a non-coronavirus HLA-E restricted epitope. See e.g., aspects 35-41.
[0975] 256. The method of aspects 255, wherein the HLA-E restricted epitope comprises an aa sequence selected from the group consisting of: QMPSRSLLF (SEQ ID NO:2059), TLPKRGLFL (SEQ ID NO:2060), TGPWRSLWI (SEQ ID NO: 2061), ILTDRSLWL (SEQ ID NO:2062), VNPGRSLFL (SEQ ID NO:2063), WNRLFPPLR (SEQ ID NO: 2064), TLPERTLYL (SEQ ID NO:2065), FLPNRSLLF (SEQ ID NO:2066), VMGDRSVLY (SEQ ID NO: 2067), and VMADKSIFY (SEQ ID NO:2068).
[0976] 257. The method of aspects 255, wherein the HLA-E restricted epitope comprises an aa sequence selected from the group consisting of: VMPPRTLLL (SEQ ID NO.: 2069), VMAPRTLFL (SEQ ID NO:2070), VNPGRSLFL (SEQ ID NO: 2063), QMPSRSLLF (SEQ ID NO.: 2071), TLPERTLYL (SEQ ID NO:2065), VMPGRTLCF (SEQ ID NO: 2072), ILTDRSLWL (SEQ ID NO:262), RMPPRSVLL (SEQ ID NO:2073), TAPARTMFL (SEQ ID NO.: 2074), and NMPARTVLF SEQ ID NO:2075.
[0977] 258. The method of aspects 255, wherein the epitope comprises the aa sequence WNRILPNAY SEQ ID NO:2076.
[0978] 259. The method of aspects 255, wherein the HLA-E restricted epitope comprises the aa sequence X1-X2-X3-X4-R-X6-X7-X8-X9-X10, where: X1 is absent or S, K, A, I, L, or T; X2 is L, I, K or V; X3 is P, A or S; X4 is G, V, P, D or R; X6 is S or T; X7 is L, I, or V; X8 is F, W, or E; X9 is L. F, W or E; and X10 F, H, S, A or absent SEQ ID NO: 2077.
[0979] 260. The method of aspects 255, wherein the HLA-E restricted epitope comprises the aa sequence LP (G or V) RSLFL SEQ ID NO:2078, or LP (G or V) RSLWL (SEQ ID NO:2079).
[0980] 261. The method of aspects 255, wherein the epitope comprises a CMV aa sequence selected from the group consisting of: VLPHRTQFL (SEQ ID NO:2080), TGAARSFFF (SEQ ID NO:2081), and VMAPRTLIL (SEQ ID NO: 2082).
[0981] 262. The method of aspects 255, wherein the HLA-E restricted epitope comprises a CMV aa sequence selected from the group consisting of: SAPLKTRFL (SEQ ID NO:2083), and SVPLKTRFL (SEQ ID NO:2084).
[0982] 263. The method of any of aspects 241-2262, wherein the one or more independently selected MOD polypeptide sequences comprise an IL-2 MOD polypeptide sequence and/or a variant IL-2 MOD polypeptide sequence.
[0983] 264. The method of aspect 263, wherein the one or more independently selected MOD polypeptide sequences comprises a variant MOD polypeptide sequence.
[0984] 265. The method of aspect 264, wherein the one or more independently selected MOD polypeptide sequences comprises an H16 substitution and/or an F42 substitution (e.g., H16A and F42A).
[0985] 266. The method of any of aspects 213-265, further comprising administering one or more therapeutic agents that enhance CD8+ T cell functions (e.g., effector function such as granule-dependent and granule-independent cytotoxic response, differentiation, and/or proliferation), one or more immunomodulatory agents, and/or one or more additional therapeutic agents (e.g., chemotherapeutic agents or immune checkpoint inhibitors).
[0986] 267. The method of aspect 266, wherein the one or more therapeutic agents are selected from the group consisting of: type I interferons (IFNs), recombinant IFN (e.g., rIFNβ or rIFNγ).
[0987] 268. The use of one or more T-Cell-MP-epitope conjugates, one or more duplex T-Cell-MP-epitope conjugates, or one or more higher order complexes of a T-Cell-MP-epitope conjugate according to any of aspects 1-212, for the preparation of a medicament for the treatment of a coronavirus infection, a neoplasm, or ablation of a tissue or cell type.
[0988] 269. The use according to aspect 268, for the treatment of a malignant neoplasm.
[0989] 270. One or more T-Cell-MP-epitope conjugates, one or more duplex T-Cell-MP-epitope conjugates, or one or more higher order complexes of a T-Cell-MP-epitope conjugate according to any of aspects 1-212, for use in treating a coronavirus infection or long COVID.
[0990] 271. One or more T-Cell-MP-epitope conjugates, one or more duplex T-Cell-MP-epitope conjugates, or one or more higher order complexes of a T-Cell-MP-epitope conjugate according to any of aspects 1-212, for use in treating a neoplasm or for the ablation of a tissue or cell type.
[0991] 272. The one or more T-Cell-MP-epitope conjugates, one or more duplex T-Cell-MP-epitope conjugates, or one or more higher order complexes of a T-Cell-MP-epitope conjugates of aspect 271, wherein the neoplasm is benign or precancerous.
[0992] 273. The one or more T-Cell-MP-epitope conjugates, one or more duplex T-Cell-MP-epitope conjugates, or one or more higher order complexes of a T-Cell-MP-epitope conjugates of aspect 271, wherein the neoplasm is malignant.
[0993] 274. A method of selectively delivering one or more (e.g., two or more) wt. MOD polypeptides and/or one or more (e.g., two or more) variant MOD polypeptides to one or more coronavirus epitope-specific CD8+ T cells of a patient or subject, the method comprising contacting the one or more cells or tissues of the patient or subject, or administering to the patient or subject (e.g., a patient in need thereof) an effective amount of: (i) one or more T-Cell-MP-epitope conjugates or higher complexes thereof (e.g., duplexes) of any of aspects 1-212.
[0994] 275. The method of aspect 274, wherein the one or more wt. MOD polypeptides and/or variant MOD polypeptides are selected independently from the group consisting of: 4-1BBL, PD-L1, IL-2, CD80, CD86, OX40L (CD252), Fas ligand (FasL), ICOS-L, ICAM, CD30L, CD40, CD83, HVEM (CD270), JAG1 (CD339), CD70, TGF-β1, TGF-β2, and TGF-β3 wt. MOD or variant MOD polypeptide sequences of any thereof.
[0995] 276. The method of aspect 274 or 275, wherein the one or more wt. MOD polypeptides and/or variant MOD polypeptides are selected independently from the group consisting of: 4-1BBL, PD-L1 IL-2, CD80, CD86, and FasL wt. MOD and variant MOD polypeptide sequences of any thereof.
[0996] 277. The method of any of aspects 274-276, wherein the T-Cell-MP or duplex T-Cell-MP comprises at least one IL-2 wt. MOD or at least one IL-2 variant MOD polypeptide sequence, and at least one CD80, CD86, variant CD80 or variant CD86 polypeptide sequence.
[0997] 278. The method of any of aspects 274-277, wherein the T-Cell-MP or duplex T-Cell-MP comprises at least one IL-2 wt. MOD or variant IL-2 MOD polypeptide sequence, or at least one pair of IL-2 wt. MOD or at least one pair of IL-2 variant MOD polypeptide sequences in tandem.
[0998] 279. The method or use of any of aspects 274-277, wherein the T-Cell-MP or duplex T-Cell-MP comprises at least one wt. MOD or variant CD80 and/or CD86 MOD polypeptide sequence.
[0999] 280. The method of any of aspects 274-277, wherein the T-Cell-MP or duplex T-Cell-MP comprises at least one PD-L1 wt. MOD or variant MOD polypeptide sequence.
[1000] 281. The method of any of aspects 274-277, wherein the T-Cell-MP or duplex T-Cell-MP comprises at least one FasL wt. MOD or variant MOD polypeptide sequence.
[1001] 282. The method or use of any of aspects 213-281, wherein the patient or subject is human.
[1002] 283. The method of any of aspects 213-281, wherein the patient or subject is non-human mammal (e.g., rodent, lagomorph, bovine, canine, feline, rodent, murine, caprine, simian, ovine, equine, lapine, porcine, etc.).
[1003] 284. The method or use of any of aspects 213-283, wherein the administering is conducted intramuscularly, intralymphatically, intratracheally, intracranially, subcutaneously, intradermally, topically, intravenously, intraarterially, rectally, nasally, orally, or by other enteral or parenteral routes of administration.
[1004] 285. The method or use of any of aspects 213-284, wherein effective amount of one or more T-Cell-MP-epitope conjugates or one or more duplex T-Cell-MP-epitope conjugates or other higher order complexes of T-Cell-MP-epitope conjugates administered to the patient or subject is from about 1 ng/kg body weight and about 20 mg/kg body weight per dose or from about 1 mg/kg body weight to about 50 mg/kg body weight per dose.
[1005] 286. The method or use of aspect 285, wherein the effective amount is from about 0.1 mg/kg body weight to 25 mg/kg body weight per dose, or about 0.1 mg/kg body weight to about 10 mg/kg body weight dose.
[1006] 287. The method or use of any of aspects 213-286, wherein multiple doses of one or more T-Cell-MP-epitope conjugates or one or more duplex T-Cell-MP-epitope conjugates or other higher order complexes of T-Cell-MP-epitope conjugates are administered to a patient or subject.
[1007] 288. The method or use of aspect 287, wherein doses are administered once every 2-6 months, or once per month.
[1008] 289. The method or use of aspect 287, wherein doses are administered once every three weeks, or more frequently than once every three weeks.
[1009] 290. The method or use of aspect 287, wherein doses are administered once a week, once every two weeks, once every three weeks, once every four weeks, once per month.
[1010] 291. The method or use of aspect 287, wherein doses are administered once per week, e.g., twice per week (biw), three times per week (tiw), four times per week, five times per week, six times per week, every other day (qod), or daily (qd).
[1011] 292. The method or use of any of aspects 213-291, wherein the duration of administration is from about one month to about two months, from about two months to about four months, or from about four months to about six months.
[1012] 293. The method or use of any of aspects 213-291, wherein the duration of administration is from about six months to about eight months, or from about eight months to about 1 year.
[1013] 294. The method or use of any of aspects 213-291, wherein the duration of administration is from about 1 year to about 2 years, or from about 2 years to about 4 years.
[1014] 295. A method of inducing or causing the proliferation of memory T cells specific to a coronavirus epitope, the method comprising: administering to a patient or subject an effective amount of: (i) one or more T-Cell-MP-epitope conjugates, duplex T-Cell-MP-epitope conjugates, or other higher complexes thereof of any of aspects 1-34 or 42-212, wherein the epitope is a coronavirus epitope set forth in Table 3a.

### XV. EXAMPLES

[1015] A series of examples are provided herein using T-Cell-MPs and their epitope conjugates. To the extent that the examples illustrate T-cell-MP-epitope conjugates comprising epitopes other than those described herein, they are provided to demonstrate a number of the properties of T-Cell-MPs and their epitope conjugates including, but not limited to, their manufacturability and the ability of T-Cell-MP-epitope conjugates induce responses in T cells specific to the conjugated epitope. The sequences of the constructs described in the examples are set forth in FIG. 19.

### Example 1

[1016] Nucleic acids were prepared encoding a series of constructs comprising an HLA-A*02:01 (HLA-A02) class I heavy chain polypeptide sequence, a human β2M polypeptide sequence, and an IgG scaffold sequence, as core elements of split chain or single chain constructs shown as duplexes in FIG. 12 at A, B and C.

[1017] Each of the split chain constructs (structures A or B) has a first polypeptide sequence that comprises from the N-terminus to the C-terminus tandem human IL-2 polypeptide sequences (2xhIL2) with F42A, H16A substitutions, HLA-A*02:01 (A02) α1, α2, and α3 domains, and a human IgG1 scaffold with L234A and L235A substitutions. The 1694 first polypeptide appearing in most of the split chain constructs comprises an A236C, Y84C and A139C substitutions 2xhIL2 (F42A, H16A)-(G₄S)₄-HLA-A02 (A236C, Y84C, A139C)-AAAGG-IgG1 (L234A, L235A): APTSSSTKKTQLQLEALLLDLQMILNGINNYKNPKLTRMLTAKFYMPKKATELKHLQCLEEELKPLEEVLNLA QSKNFHLRPRDLISNINVIVLELKGSETTFMCEYADETATIVEFLNRWITFCQSIISTLTGGGGGGGGSGGGGSGGG GSAPTSSSTKKTQLQLEALLLDLQMILNGINNYKNPKLTRMLTAKFYMPKKATELKHLQCLEEELKPLEEVLNLAQSKN FHLRPRDLISNINVIVLELKGSETTFMCEYADETATIVEFLNRWITFCQSIISTLTGGGGGGGGSGGGGSGGGGSGS HSMRYFFTSVSRPGRGEPRFIAVGYVDDTQFVRFDSDAASQRMEPRAPWIEQEGPEYWDGETRKVKAHSQTHRVD LGTLRGCYNQSEAGSHTVQRMYGCDVGSDWRFLRGYHQYAYDGKDYIALKEDLRSWTAADMCAQTTKHKWEAAH VAEQLRAYLEGTCVEWLRRYLENGKETLQRTDAPKTHMTHHAVSDHEATLRCWALSFYPAEITLTWQRDGEDQTQD TELVETRPCGDGTFQKWAAVVVPSGQEQRYTCHVQHEGLPKPLTLRWEAAAGGDKTHTCPPCPAPEAAGGPSVFL FPPKPKDTLMISRTPEVTCVVVDVSHEDPEVKFNWYVDGVEVHNAKTKPREEQYNSTYRVVSVLTVLHQDWLNGKE YKCKVSNKALPAPIEKTISKAKGQPREPQVYTLPPSREEMTKNQVSLTCLVKGFYPSDIAVEWESNGQPENNYKTTPP VLDSDGSFFLYSKLTVDKSRWQQGNVFSCSVMHEALHNHYTQKSLSLSPGK (linker sequences are indicated in bold and italics) (SEQ ID NO:506).

[1018] The 4008 polypeptide appearing in two split chain constructs parallels the 1694 construct, but comprises A236C, Y85C, and D137C substitutions in the HLA-A02 sequence-2xhIL2 (F42A, H16A)-(G₄S)₄-HLA-A02 (A236C, Y85C, D137C)-AAAGG-IgG1 (L234A, L235A): APTSSSTKKTQLQLEALLLDLQMILNGINNYKNPKLTRMLTAKFYMP KKATELKHLQCLEEELKPLEEVLNLAQSKNFHLRPRDLISNINVIVLELKGSETTFMCEYADETATIVEFLNRWITFCQSII STLTGGGGSGGGGGGGGSGGGGSAPTSSSTKKTQLQLEALLLDLQMILNGINNYKNPKLTRMLTAKFYMPKKATE LKHLQCLEEELKPLEEVLNLAQSKNFHLRPRDLISNINVIVLELKGSETTFMCEYADETATIVEFLNRWITFCQSIISTLTG GGGSGGGGSGGGGSGGGGSGSHSMRYFFTSVSRPGRGEPRFIAVGYVDDTQFVRFDSDAASQRMEPRAPWIEQ EGPEYWDGETRKVKAHSQTHRVDLGTLRGYCNQSEAGSHTVQRMYGCDVGSDWRFLRGYHQYAYDGKDYIALKE DLRSWTAACMAAQTTKHKWEAAHVAEQLRAYLEGTCVEWLRRYLENGKETLQRTDAPKTHMTHHAVSDHEATLRC WALSFYPAEITLTWQRDGEDQTQDTELVETRPCGDGTFQKWAAVVVPSGQEQRYTCHVQHEGLPKPLTLRWEAAA GGDKTHTCPPCPAPEAAGGPSVFLFPPKPKDTLMISRTPEVTCVVVDVSHEDPEVKFNWYVDGVEVHNAKTKPREE QYNSTYRVVSVLTVLHQDWLNGKEYKCKVSNKALPAPIEKTISKAKGQPREPQVYTLPPSREEMTKNQVSLTCLVKG FYPSDIAVEWESNGQPENNYKTTPPVLDSDGSFFLYSKLTVDKSRWQQGNVFSCSVMHEALHNHYTQKSLSLSPGK (SEQ ID NO:533).

[1019] Each of the split chain constructs (structures A and B) in FIG. 12 comprises a second polypeptide comprising a β2M polypeptide sequence having R12C and E44C substitutions: IQRTPKIQVYSCHPAENGKSNFLNC YVSGFHPSDIEVDLLKNGCRIEKVEHSDLSFSKDWSFYLLYYTEFTPTEKDEYACRVNHVTLSQPKIVKWDRDM (SEQ ID NO: 507); to which ether the indicated linker, or virus peptide (CMV peptide epitope NLVPMVATV (SEQ ID NO: 500) and linker, is added at their N-termini as indicated in the table provided below.

[1020] The unconjugated single chain T-Cell-MP conjugates listed in FIG. 12 each comprise as a single polypeptide chain from N-terminus to C-terminus IL-2, β2M, HLA-A*02:01 (A02) α1, α2, and α3 domains, and human IgG1 polypeptide sequences. The aa sequence of the 3861 construct is provided below, and the remainder of the single chain T-Cell-MP constructs may be considered variations of the 3861 construct, which has tandem 2xIL-2 sequences with F42A and H16A substitutions-a (G₄S)₄ linker-β2M (E44C)-a (G₄S)₃ linker-HLA-A02 with Y84C, A139C-a AAAGG linker- and an IgG1 with L234A and L235A substitutions: APTSSSTKKTQLQLEALLLDLQMILNGI NNYKNPKLTRMLTAKFYMPKKATELKHLQCLEEELKPLEEVLNLAQSKNFHLRPRDLISNINVIVLELKGSETTFMCEY ADETATIVEFLNRWITFCQSIISTLTGGGGSGGGGSGGGGSGGGGSAPTSSSTKKTQLQLEALLLDLQMILNGINNYK NPKLTRMLTAKFYMPKKATELKHLQCLEEELKPLEEVLNLAQSKNFHLRPRDLISNINVIVLELKGSETTFMCEYADET ATIVEFLNRWITFCQSIISTLTGGGGSGGGGSGGGGSGGGGSIQRTPKIQVYSRHPAENGKSNFLNCYVSGFHPSDIE VDLLKNGCRIEKVEHSDLSFSKDWSFYLLYYTEFTPTEKDEYACRVNHVTLSQPKIVKWDRDMGGGGSGGGGSGG GGSGSHSMRYFFTSVSRPGRGEPRFIAVGYVDDTQFVRFDSDAASQRMEPRAPWIEQEGPEYWDGETRKVKAHS QTHRVDLGTLRGCYNQSEAGSHTVQRMYGCDVGSDWRFLRGYHQYAYDGKDYIALKEDLRSWTAADMCAQTTKH KWEAAHVAEQLRAYLEGTCVEWLRRYLENGKETLQRTDAPKTHMTHHAVSDHEATLRCWALSFYPAEITLTWQRDG EDQTQDTELVETRPAGDGTFQKWAAVVVPSGQEQRYTCHVQHEGLPKPLTLRWEAAAGGDKTHTCPPCPAPEAA GGPSVFLFPPKPKDTLMISRTPEVTCVVVDVSHEDPEVKFNWYVDGVEVHNAKTKPREEQYNSTYRVVSVLTVLHQ DWLNGKEYKCKVSNKALPAPIEKTISKAKGQPREPQVYTLPPSREEMTKNQVSLTCLVKGFYPSDIAVEWESNGQPE NNYKTTPPVLDSDGSFFLYSKLTVDKSRWQQGNVFSCSVMHEALHNHYTQKSLSLSPG (SEQ ID NO:508).

[1021] Where tandem IL-2 sequences are present in the constructs of this example, they are separated by a (G₄S)₄ linker (SEQ ID NO:501). Each of the sequences other than 3861 has variations in the linkers present between the IL-2 and β2M, and/or β2M and HLA-A02 sequences (the L3 linker) as indicated. Additionally, construct 3984 has only a single IL-2 sequence, and each of 3999-4002 have an additional aa substitution in the HLA-A02 polypeptide sequence as indicated in the table that follows.

TABLE 4

| | | |
|---|---|---|
| | Form in | |
| Construct | FIG. 12 | Construct Content and Organization |

Split Chain Construct

| | | | |
|---|---|---|---|
| 1694 | 2686 | B | β2M (R12C, E44C) |
| | 839 | A | CMV-GGGASGGGGSGGGGS-β2M (R12C) |
| | 3993 | B | GM-(G₄S)₃-β2M (R12C, E44C) |
| | 3994 | B | GMGGS-(G₄S)₂-β2M (R12C, E44C) |
| | 3995 | B | GMS-(G₄S)₂-β2M (R12C, E44C) |
| | 3996 | B | GMGGGS-(G₄S)-β2M (R12C, E44C) |
| | 3997 | B | GMGS-(G₄S)-β2M (R12C, E44C) |
| | 3998 | B | GM-(G₄S)-β2M (R12C, E44C) |
| | 4002 | A | CMV-(G₃AS)-(G₄S)₂-β2M (R12C, E44C) |
| | 4003 | A | CMV-(G₃AS)-(GAS)-FC1-(G₄S)-β2M (R12C, E44C) |
| 4008 | 839 | A | CMV-GGGASGGGGSGGGGS-β2M (R12C) |
| | 2686 | B | β2M (R12C, E44C) |

Unconjugated T-Cell-MP (Single Chain Construct)

| | | |
|---|---|---|
| | C | 1xhIL2(F42A, H16A)-(G₄S)₄-β2M (E44C)-(G₄S)₃-HLA-A02(Y84C, A139C)- |
| | | AAAGG-IgG1(L234A, L235A) |
| 3985 | C | hIL2 (F42A, H16A)-(G₄S)₄-hIL2 (F42A, H16A)-(G₄S)-GLGGS-(G₄S)₂-β2M |
| | | (E44C)-(G₄S)₃-HLA-A02(Y84C, A139C)-AAAGG-IgG1(L234A, L235A) |
| 3986 | C | hIL2 (F42A, H16A)-(G₄S)₄-hIL2 (F42A, H16A)-(G₄S)₂-GLGGS-(G₄S)-β2M |
| | | (E44C)-(G₄S)₃-HLA-A02(Y84C, A139C)-AAAGG-IgG1(L234A, L235A) |
| 3987 | C | hIL2 (F42A, H16A)-(G₄S)₄-hIL2 (F42A, H16A)-(G₄S)₃-GLGGS-β2M (E44C)- |
| | | (G₄S)₃-HLA-A02(Y84C, A139C)-AAAGG-IgG1(L234A, L235A) |
| 3988 | C | hIL2 (F42A, H16A)-(G₄S)₄-hIL2 (F42A, H16A)-(G₄S)-GMGGSGGGGS-(G₄S)- |
| | | β2M (E44C)-(G₄S)₃-HLA-A02(Y84C, A139C)-AAAGG-IgG1(L234A, L235A) |
| 3989 | C | hIL2 (F42A, H16A)-(G₄S)₄-hIL2 (F42A, H16A)-(G₄S)-GGGMSGGGGS-(G₄S)- |
| | | β2M (E44C)-(G₄S)₃-HLA-A02(Y84C, A139C)-AAAGG-IgG1(L234A, L235A) |
| 3990 | C | hIL2 (F42A, H16A)-(G₄S)₄-hIL2 (F42A, H16A)-(G₄S)-GGGGSMGGGS-(G₄S)- |
| | | β2M (E44C)-(G₄S)₃-HLA-A02(Y84C, A139C)-AAAGG-IgG1(L234A, L235A) |
| 3991 | C | hIL2 (F42A, H16A)-(G₄S)₄-hIL2 (F42A, H16A)-(G₄S)-GGGGSGMGGS-(G₄S)- |
| | | β2M (E44C)-(G₄S)₃-HLA-A02(Y84C, A139C)-AAAGG-IgG1(L234A, L235A) |
| 3992 | C | hIL2 (F42A, H16A)-(G₄S)₄-hIL2 (F42A, H16A)-(G₄S)-GGGGSGGGGM-(G₄S)- |
| | | β2M (E44C)-(G₄S)₃-HLA-A02(Y84C, A139C)-AAAGG-IgG1(L234A, L235A) |
| 3861 | C | hIL2 (F42A, H16A)-(G₄S)₄-hIL2 (F42A, H16A)-(G₄S)₄-β2M (E44C)-(G₄S)₃- |
| | | HLA-A02(Y84C, A139C)-AAAGG-IgG1(L234A, L235A) |
| 4004 | C | hIL2 (F42A, H16A)-(G₄S)₄-hIL2 (F42A, H16A)-(G₄S)₅-β2M (E44C)-(G₄S)₃- |
| | | HLA-A02(Y84C, A139C)-AAAGG-IgG1(L234A, L235A) |
| 4005 | C | hIL2 (F42A, H16A)-(G₄S)₄-hIL2 (F42A, H16A)-(G₄S)₆-β2M (E44C)-(G₄S)₃- |
| | | HLA-A02(Y84C, A139C)-AAAGG-IgG1(L234A, L235A) |
| 4006 | C | hIL2 (F42A, H16A)-(G₄S)₄-hIL2 (F42A, H16A)-(G₄S)₄-β2M (E44C)-(G₄S)₂- |
| | | HLA-A02(Y84C, A139C)-AAAGG-IgG1(L234A, L235A) |
| 4007 | C | hIL2 (F42A, H16A)-(G₄S)₄-hIL2 (F42A, H16A)-(G₄S)₄-β2M (E44C)-(G₄S)- |
| | | HLA-A02(Y84C, A139C)-AAAGG-IgG1(L234A, L235A) |
| 3999 | C | hIL2 (F42A, H16A)-(G₄S)₄-hIL2 (F42A, H16A)-(G₄S)₄-β2M (E44C)-(G₄S)₃- |
| | | HLA-A02(Y84C, A139C, T143L)-AAAGG-IgG1(L234A, L235A) |
| 4000 | C | hIL2 (F42A, H16A)-(G₄S)₄-hIL2 (F42A, H16A)-(G₄S)₄-β2M (E44C)-(G₄S)₃- |
| | | HLA-A02(Y84C, A139C, T143M)-AAAGG-IgG1(L234A, L235A) |
| 4001 | C | hIL2 (F42A, H16A)-(G₄S)₄-hIL2 (F42A, H16A)-(G₄S)₄-β2M (E44C)-(G₄S)₃- |
| | | HLA-A02(L81M, Y84C, A139C)-AAAGG-IgG1(L234A, L235A) |

[1022] The nucleic acids encoding the protein constructs were transfected into and expressed by CHO cells as soluble protein in the culture media. The level of protein expressed in the culture media after 7 days was determined by BLI assay using protein A to capture the expressed protein (FIG. 12 at D). The fraction of protein appearing in unaggregated duplex form is assessed by isolating the protein from the culture media using magnetic protein A beads. After washing, the bound protein is eluted from the beads by reducing the pH, and then subject to analytical size exclusion chromatography using UV detection on an AGILENT® chromatography system. The fraction of unaggregated protein reported in FIG. 12 at E is based on the area of the peak corresponding to the molecular weight of the duplex relative to the total area of the chromatographed protein.

[1023] The results indicate that unconjugated single chain T-Cell-MP constructs appear to be expressed more uniformly at higher levels than their unconjugated split chain construct counterparts.

### Example 2

[1024] The effect of time in culture, cell culture density, and culture temperature on unconjugated T-Cell-MPs was examined by transiently expressing the construct 3861 (see Example 1) in CHO cells at 28 and 32° C. Transfection was accomplished with expiCHO® transfection kits (Gibco™/ThermoFisher Scientific, Skokie, IL) using a recombinant pTT5 vector into which the cassette encoding the polypeptide was cloned. The transfected cells were diluted to 2, 4 or 6 million cells per milliliter and T-Cell-MP 3861 expression levels and the fraction of unaggregated protein in duplex form determined at days 2, 4, 7, and/or 9 as indicated by removing a portion of the culture. Analyses were conducted as in Example 1 and are shown in FIG. 13 (at A and B) with the number of cells and culture temperature shown below each histogram set (e.g., six million cells at 32° C. denoted as 6M/32C). Also shown in FIG. 13 are size exclusion chromatograms (C and D) of the unconjugated 3861 T-Cell-MP harvested from a culture using protein A and after further purification by size exclusion chromatography (upper and lower chromatograms respectively). Coomassie blue stained SDS PAGE analysis (at E) confirms the purity and homogeneity of the purified material, samples of which were applied to the gel in reduced (R) and non-reduced form (NR).

### Example 3

[1025] The specific interaction of T-Cell-MP-epitope conjugates and control constructs with epitope-specific T cells was assessed by incubating the molecules with T cells responsive to either the CMV peptide NLVPMVATV (black bars) (SEQ ID NO:500) or the Melan-A and Mucin Related Peptide (MART-1) ELAGIGIL TV (white bars) (SEQ ID NO: 502) in the histogram of Elispot data provided FIG. 14A. Control samples of the unconjugated 3861 T-Cell-MP duplex (see FIG. 12 at C for the general structure) group 1, and an unconjugated split chain construct comprising polypeptides 1694 and 2686 (duplexed as in FIG. 12 at B) group 2 were run in parallel with test samples. T-Cell-MP and split chain constructs conjugated to the E44C position of β2M through a (G₄S)₃ linker by a maleimide group are shown in groups 3 and 4. The effect of control construct split chain fusion proteins (FIG. 12, structure A) having a CMV or MART-1 polypeptide as part of the fusion protein are shown in groups 5 and 6 respectively. Control stimulation by CMV and MART-1 peptides is shown in groups 7 and 8 respectively. The histogram indicates the number of spots due to captured interferon gamma indicating activation of the T cells by the treatments.

[1026] The SDS-PAGE gel shown in FIG. 14 B provides an analysis of reducing and non-reducing samples of the epitope conjugates and fusion proteins, indicating their purity and homogeneity.

### Example 4

[1027] Ficoll-Paque® purified samples of leukocytes from CMV responsive donors (Donors 8, 10, 38, and 39) and MART-1 responsive donors (Donors 17 and 18) were prepared and used to demonstrate the ability of T-Cell-MP-epitope conjugates to expand T cells specific to CMV or MART-1 specific epitopes. MART-1 responsive Donor 18 also displays some responsiveness to the CMV peptide. Positive and negative control treatments included: treatment with split chain constructs conjugated to CMV and MART-1 peptides; treatment with the CMV or MART-1 peptides in culture media; and media only control treatment. For the experiments, leukocytes were suspended at 2.5×10⁶ cells per ml in ImmunoCult™ media (Stemcell Technologies, Vancouver, British Columbia) containing the indicated amounts of the control or T-Cell-MP-epitope conjugate or control treatments. After 10 days in culture the number of cells responsive to CMV or MART-1 were assessed by Flow cytometry using CMV or MART-1 tetramers purchased from MBL International Corp. The results indicate that both the T-Cell-MP and split chain constructs conjugated to the CMV peptide, and to a lesser degree cMV peptide, stimulate expansion of CMV specific T cells from CMV responsive donors in a concentration dependent manner. T-Cell-MP and split chain constructs conjugated to the MART-1 peptide, and to a lesser degree the MART-1 peptide stimulate expansion of MART-1 specific T cells from MART-1 responsive donors in a concentration dependent manner. In each instance, CMV peptide conjugates selectively stimulated T cells from CMV responsive donors but not MART-1 responsive donors and vice versa. Free peptide in the absence of IL-2 failed to produce an effect equal to the effect observed with the T-Cell-MP-epitope conjugates. Results are provided in FIG. 15.

[1028] The T-Cell-MP-epitope conjugate employed for the assays was a duplex of the 3186 polypeptide (see Example 1 and FIG. 12 structure C for the general form of the unconjugated duplex) conjugated at a cysteine (E44C) in the β2M polypeptide sequence to either a CMV (NLVPMVATV, SEQ ID NO:500) or MART-1 (ELAGIGILTV) (SEQ ID NO: 502) peptide via a (G₄S)₃ linker bearing a maleimide group (e.g., for the CMV peptide NLVPMVATV-(G₄S)₃-lysine-epsilon amino-maleimide). The split chain epitope conjugate was a duplex of two split chain constructs each comprising α1694 and 2686 polypeptide (see Example 1 and FIG. 12 structure B for the general form of the unconjugated duplex), which was conjugated at a cysteine (E44C) in the β2M polypeptide sequence to a either a CMV (NLVPMVATV, SEQ ID NO:500) or MART-1 (ELAGIGILTV, SEQ ID NO:502) peptide via a (G₄S)₃ (SEQ ID NO: 285) linker bearing a maleimide group. After reduction to remove any capping from the cysteine conjugation sites, the conjugation was conducted as described in for maleimide coupling reactions using at least two additions of the peptide bearing a maleimide group.

[1029] In an additional test, the effect of a construct bearing a (G₄S)₇ (SEQ ID NO:503) L3 linker (the linker between the β2M and HLA-A02 sequences), but otherwise identical to 3861, was compared with the 3861 polypeptide duplex (i.e., construct 4125 2xIL2 (F42A, H16A)-(G₄S)₇-β2M (E44C)-(G₄S)₃-HLA-A02 (Y84C, A139C)-AAAGG-IgG1 (L234A, L235A)). Duplexes of both the 3861 and 4125 constructs were conjugated to a CMV or MART-1 peptide by a maleimide terminated (G₄S)₃ linker and tested side-by-side for the ability to expand T cells in an epitope-specific manner. The assays were conducted as described above for the 3861 epitope conjugates, except only a media alone control was conducted. The results, shown in FIG. 16, indicate that extending the linker length did not substantively alter the expansion of T cells seen with the 3861 epitope conjugates.

### Example 5

[1030] In order to examine the effect of L3 linker length on the level of cell expression and the quality (fraction unaggregated) of T-Cell-MP proteins a series of nucleic acids encoding constructs 4125 through 4128 that are related to construct 3861 but with L3 linkers of increasing length were prepared and inserted into an expression vector (pTT5). A second set of constructs (4129-4133) bearing an additional R12C substitution in the β2M polypeptide (R12C, E44C) and an A236C substitution in the HLA-A02 peptide that can form an interchain disulfide bond was also prepared. The vectors were transfected into CHO cells with expiCHO® transfection kits and both the amount of protein expressed in the culture media and the fraction of unaggregated protein after purification using magnetic beads was assessed at days 4, 6, 8, and/or 11 as indicated. The specific constructs included those recited in the following table.

| | Form in | L3 linker | |
|---|---|---|---|
| Construct | FIG. 12 | (G₄S)n | Construct Content and Organization |
| 3861 | C | n = 3 | hIL2 (F42A, H16A)-(G₄S)₄-hIL2 (F42A, H16A)-(G₄S)₄-β2M (E44C)-(G₄S)₃- |
| | | | HLA-A02(Y84C, A139C)-AAAGG-IgG1(L234A, L235A) |
| 4128 | C | n = 4 | hIL2 (F42A, H16A)-(G₄S)₄-hIL2 (F42A, H16A)-(G₄S)₄-β2M (E44C)-(G₄S)₄- |
| | | | HLA-A02(Y84C, A139C)-AAAGG-IgG1(L234A, L235A) |
| 4127 | C | n = 5 | hIL2 (F42A, H16A)-(G₄S)₄-hIL2 (F42A, H16A)-(G₄S)₄-β2M (E44C)-(G₄S)₅- |
| | | | HLA-A02(Y84C, A139C)-AAAGG-IgG1(L234A, L235A) |
| 4126 | C | n = 6 | hIL2 (F42A, H16A)-(G₄S)₄-hIL2 (F42A, H16A)-(G₄S)₄-β2M (E44C)-(G₄S)₆- |
| | | | HLA-A02(Y84C, A139C)-AAAGG-IgG1(L234A, L235A) |
| 4125 | C | n = 7 | hIL2 (F42A, H16A)-(G₄S)₄-hIL2 (F42A, H16A)-(G₄S)₄-β2M (E44C)-(G₄S)₇- |
| | | | HLA-A02(Y84C, A139C)-AAAGG-IgG1(L234A, L235A) |
| 4129 | C | n = 7 | hIL2 (F42A, H16A)-(G₄S)₄-hIL2 (F42A, H16A)-(G₄S)₄-β2M (R12C, E44C)- |
| | | | (G₄S)₇-HLA-A02(Y84C, A139C, A236C)-AAAGG-IgG1(L234A, L235A) |
| 4130 | C | n = 6 | hIL2 (F42A, H16A)-(G₄S)₄-hIL2 (F42A, H16A)-(G₄S)₄-β2M (R12C, E44C)- |
| | | | (G₄S)₆-HLA-A02(Y84C, A139C, A236C)-AAAGG-IgG1(L234A, L235A) |
| 4131 | C | n = 5 | hIL2 (F42A, H16A)-(G₄S)₄-hIL2 (F42A, H16A)-(G₄S)₄-β2M (R12C, E44C)- |
| | | | (G₄S)₅-HLA-A02(Y84C, A139C, A236C)-AAAGG-IgG1(L234A, L235A) |
| 4132 | C | n = 4 | hIL2 (F42A, H16A)-(G₄S)₄-hIL2 (F42A, H16A)-(G₄S)₄-β2M (R12C, E44C)- |
| | | | (G₄S)₄-HLA-A02(Y84C, A139C, A236C)-AAAGG-IgG1(L234A, L235A) |
| 4133 | C | n = 3 | hIL2 (F42A, H16A)-(G₄S)₄-hIL2 (F42A, H16A)-(G₄S)₄-β2M (R12C, E44C)- |
| | | | (G₄S)₃-HLA-A02(Y84C, A139C, A236C)-AAAGG-IgG1(L234A, L235A) |

[1031] The amount of the expressed unconjugated T-Cell-MP constructs were determined by BLI assay using protein A for capture on a BioForte instrument using the methods described in Example 1. Results are provided in FIG. 17 histogram A.

[1032] The fraction of unconjugated T-Cell-MP that is unaggregated (present in duplex form) after purification on magnetic protein A beads was determined by size exclusion chromatography. The fraction was determined using the area of the chromatographic peak corresponding to the molecular weight of the duplex relative to the area under the chromatogram as described in Example 1. Results are shown in FIG. 17 histogram B.

[1033] Additional optimization indicates that higher yields are possible. Construct 4125 has been observed to reach 200 mg/ml and construct 4127 has been observed to reach 170 mg/ml in CHO culture cell media prior to isolation.

### Example 6 Expansion of T Cells Recognizing a SARs-CoV-2 Epitope

[1034] A T-Cell-MP-Epitope Conjugate designated NST-0032 comprising a conjugated coronavirus peptide epitope (a T-Cell-MP-coronavirus epitope conjugate) was prepared and tested for its ability to expand T-cells specific for the epitope. For the preparation of NST-0032 the unconjugated T-cell-MP 4125, which has tandem IL-2 MODs, was prepared by as outlined in Example 5. The aa sequence of the unconjugated T-Cell-MP 4125 is provided in FIG. 19 and is generally of the form of the depicted in FIG. 9 structure A, self-assembling into a duplex as in structure B. The unconjugated duplex of construct 4125, which bears solvent accessible cysteine chemical conjugation site due to a substitution of Lys 44 with a Cys (E44C), was conjugated at that cysteine to the spike protein peptide epitope YLQPRTELL (SEQ ID NO:461). The conjugation, which was indirect through a 3× G₄S (SEQ ID NO:285) peptide linker, employed a maleimide reactive group to form the covalent bond. The peptide construct used for the conjugation was of the form YLQPRTFLLGGGGSGGGGSGGGGSX (SEQ ID NO:504), where X is a lysine modified on its sidechain amino group with the reactive maleimide (see, e.g., FIG. 8 structure C). The resulting T-Cell-MP-epitope conjugate designated NST-0032, which is forms a duplex (see FIG. 9 structure C) was separated from unreacted peptide epitope maleimide reagent and placed in PBS-saline.

[1035] Samples of peripheral blood mononuclear cells (PBMCs) from prepared from the blood of four donors vaccinated against SARS-CoV-2 that were pre-screened for reactivity to YLQPRTELL (SEQ ID NO:461) were obtained along with control PBMCs from an unvaccinated individual. Vaccination with Moderna vaccine is indicated by MRNA, Johnson & Johnson vaccine by JNJ, and Pfizer vaccine by PFE; the date and number of vaccinations is unknown.

[1036] The PMCs from the vaccinated donors and the control unvaccinated donor were exposed to a dose-response of NST-0032 (from 1 nM to 500 nm) for nine days, with a feeding of fresh culture media on day 5. At day 9 the percentage of CD8+ T cells specific to the epitope (% SCV2+ of CD8 T Cells) was determined by FACS for each concentration of NST-0032 tested. The results, shown in FIG. 23 show a clear dose response for the proliferation of CD8+ T cells specific to the epitope in three of the four vaccinated individuals.

### Example 7

[1037] Coronavirus peptide epitopes are conjugated to a T-Cell-MP as described and detailed above, thereby forming T-Cell-MP-epitope conjugates. Non-limiting examples of peptides presenting coronavirus epitopes that can be used to form T-Cell-MP-epitope conjugates include those recited in Table 2 and FIG. 21.

[1038] The above Examples illustrate the ability to produce T-Cell-MPs and conjugate them to a peptide resulting in a T-Cell-MP-epitope conjugate protein that is not aggregated, displays suitable stability for use at 37° C., and can be purified. In particular, in Examples 3 and 4 above T-Cell-MP-epitope conjugates were generated and tested wherein the T-Cell-MP is conjugated to a CMV polypeptide (“CMV+ T-Cell-MP”) or a melanoma antigen MART-1 (“MART+ T-Cell-MP”) via a maleimide reactive linker attached to the peptide. The specific interaction of T-Cell-MP-epitope conjugates with epitope-specific T cells was confirmed assessed by incubating the molecules with T cells responsive to either the CMV peptide NLVPMVATV (SEQ ID NO:500) or the Melan-A and Mucin Related Peptide (MART-1) ELAGIGILTV (SEQ ID NO:502) (FIG. 15 and FIG. 16). While the above Examples, including Examples 3 and 4, are conducted with a CMV peptide epitope and/or other peptide epitopes; coronavirus peptide epitopes can equally be utilized to form epitope conjugates providing similar results.

[1039] The antigen specificity in the responses are evidenced by the fact that CMV Control Construct and IL-2 T-Cell-MP molecules did not substantially stimulate expansion of MART-1 responsive CD8+ T-cells. Likewise, MART-1 Control Construct and IL-2 T-Cell-MP molecules did not stimulate expansion of CMV responsive CD8+ T-cells. Accordingly, the presence of IL-2 polypeptide sequences present in each of the molecules were not responsible for substantial nonspecific expansion of the leukocytes.

The application's sequence listing, which the Patent Office published only in electronic form, follows.

SEQUENCE LISTING (2092 sequences)

SEQ ID NO: 1 - protein, 352 aa, Homo sapiens
  REGION 1..352: note = Description of sequence: Homo sapiens IgA (partial sequence)
ASPTSPVFPLSLCSTQPDGNVVIACLVQGFFPQEPLSVTWSESGQGVTARNFPPSQDASGDLYTTSSQLTLPATQCLAGKSVTCHVKHYTNPSQDVTVPCPVPSTPPTPSPSTPPTPSPSCCHPRLSLHRPALEDLLLGSEANLTCTLTGLRDASGVTFTWTPSSGKSAVQGPPERDLCGCYSVSSVLPGCAEPWNHGKTFTCTAAYPESKTPLTATLSKSGNTFRPEVHLLPPPSEELALNELVTLTCLARGFSPKDVLVRWLQGSQELPREKYLTWASRQEPSQGTTTFAVTSILRVAAEDWKKGDTFSCMVGHEALPLAFTQKTIDRLAGKPTHVNVSVVMAEVDGTCY

SEQ ID NO: 2 - protein, 383 aa, Homo sapiens
  REGION 1..383: note = Description of sequence: Homo sapiens IgD (partial sequence)
PTKAPDVFPIISGCRHPKDNSPVVLACLITGYHPTSVTVTWYMGTQSQPQRTFPEIQRRDSYYMTSSQLSTPLQQWRQGEYKCVVQHTASKSKKEIFRWPESPKAQASSVPTAQPQAEGSLAKATTAPATTRNTGRGGEEKKKEKEKEEQEERETKTPECPSHTQPLGVYLLTPAVQDLWLRDKATFTCFVVGSDLKDAHLTWEVAGKVPTGGVEEGLLERHSNGSQSQHSRLTLPRSLWNAGTSVTCTLNHPSLPPQRLMALREPAAQAPVKLSLNLLASSDPPEAASWLLCEVSGFSPPNILLMWLEDQREVNTSGFAPARPPPQPRSTTFWAWSVLRVPAPPSPQPATYTCVVSHEDSRTLLNASRSLEVSYVTDHGPMK

SEQ ID NO: 3 - protein, 222 aa, Homo sapiens
  REGION 1..222: note = Description of sequence: Homo sapiens IgE (partial sequence)
ADPCDSNPRGVSAYLSRPSPFDLFIRKSPTITCLVVDLAPSKGTVNLTWSRASGKPVNHSTRKEEKQRNGTLTVTSTLPVGTRDWIEGETYQCRVTHPHLPRALMRSTTKTSGPRAAPEVYAFATPEWPGSRDKRTLACLIQNFMPEDISVQWLHNEVQLPDARHSTTQPRKTKGSGFFVFSRLEVTRAEWEQKDEFICRAVHEAASPSQTVQRAVSVNPGK

SEQ ID NO: 4 - protein, 227 aa, Homo sapiens
  REGION 1..227: note = Description of sequence: WT. Homo sapiens IgG1 (partial sequence)
DKTHTCPPCPAPELLGGPSVFLFPPKPKDTLMISRTPEVTCVVVDVSHEDPEVKFNWYVDGVEVHNAKTKPREEQYNSTYRVVSVLTVLHQDWLNGKEYKCKVSNKALPAPIEKTISKAKGQPREPQVYTLPPSREEMTKNQVSLTCLVKGFYPSDIAVEWESNGQPENNYKTTPPVLDSDGSFFLYSKLTVDKSRWQQGNVFSCSVMHEALHNHYTQKSLSLSPGK

SEQ ID NO: 5 - protein, 227 aa, Homo sapiens
  REGION 1..227: note = Description of sequence: Homo sapiens IgG1 (partial sequence) Fc
DKTHTCPPCPAPELLGGPSVFLFPPKPKDTLMISRTPEVTCVVVDVSHEDPEVKFNWYVDGVEVHNAKTKPREEQYNSTYRVVSVLTVLHQDWLNGKEYKCKVSNKALPAPIEKTISKAKGQPREPQVYTLPPSRDELTKNQVSLTCLVKGFYPSDIAVEWESNGQPENNYKTTPPVLDSDGSFFLYSKLTVDKSRWQQGNVFSCSVMHEALHNHYTQKSLSLSPGK

SEQ ID NO: 6 - protein, 227 aa, Homo sapiens
  REGION 1..227: note = Description of sequence: Homo sapiens IgG1 (partial sequence) Fc Mutant: L234F/L235E/P331S (Triple Mutant "TM")
DKTHTCPPCPAPEFEGGPSVFLFPPKPKDTLMISRTPEVTCVVVDVSHEDPEVKFNWYVDGVEVHNAKTKPREEQYNSTYRVVSVLTVLHQDWLNGKEYKCKVSNKALPASIEKTISKAKGQPREPQVYTLPPSREEMTKNQVSLTCLVKGFYPSDIAVEWESNGQPENNYKTTPPVLDSDGSFFLYSKLTVDKSRWQQGNVFSCSVMHEALHNHYTQKSLSLSPGK

SEQ ID NO: 7 - protein, 227 aa, Homo sapiens
  REGION 1..227: note = Description of sequence: Homo sapiens IgG1 (partial sequence) Fc Mutant: N297A
DKTHTCPPCPAPELLGGPSVFLFPPKPKDTLMISRTPEVTCVVVDVSHEDPEVKFNWYVDGVEVHNAKTKPREEQYASTYRVVSVLTVLHQDWLNGKEYKCKVSNKALPAPIEKTISKAKGQPREPQVYTLPPSREEMTKNQVSLTCLVKGFYPSDIAVEWESNGQPENNYKTTPPVLDSDGSFFLYSKLTVDKSRWQQGNVFSCSVMHEALHNHYTQKSLSLSPGK

SEQ ID NO: 8 - protein, 227 aa, Homo sapiens
  REGION 1..227: note = Description of sequence: Homo sapiens IgG1 (partial sequence) Fc Mutant: L234A/L235A ("LALA")
DKTHTCPPCPAPEAAGGPSVFLFPPKPKDTLMISRTPEVTCVVVDVSHEDPEVKFNWYVDGVEVHNAKTKPREEQYNSTYRVVSVLTVLHQDWLNGKEYKCKVSNKALPAPIEKTISKAKGQPREPQVYTLPPSREEMTKNQVSLTCLVKGFYPSDIAVEWESNGQPENNYKTTPPVLDSDGSFFLYSKLTVDKSRWQQGNVFSCSVMHEALHNHYTQKSLSLSPGK

SEQ ID NO: 9 - protein, 325 aa, Homo sapiens
  REGION 1..325: note = Description of sequence: Homo sapiens IgG2 (partial sequence)
STKGPSVFPLAPCSRSTSESTAALGCLVKDYFPEPVTVSWNSGALTSGVHTFPAVLQSSGLYSLSSVVTVPSSNFGTQTYTCNVDHKPSNTKVDKTVERKCCVECPPCPAPPVAGPSVFLFPPKPKDTLMISRTPEVTCVVVDVSHEDPEVQFNWYVDGVEVHNAKTKPREEQFNSTFRVVSVLTVVHQDWLNGKEYKCKVSNKGLPAPIEKTISKTKGQPREPQVYTLPPSREEMTKNQVSLTCLVKGFYPSDIAVEWESNGQPENNYKTTPPMLDSDGSFFLYSKLTVDKSRWQQGNVFSCSVMHEALHNHYTQKSLSLSPGK

SEQ ID NO: 10 - protein, 246 aa, Homo sapiens
  REGION 1..246: note = Description of sequence: Homo sapiens IgG3 (partial sequence)
HKPSNTKVDKRVELKTPLGDTTHTCPPCPAPELLGGPSVFLFPPKPKDTLMISRTPEVTCVVVDVSHEDPEVKFNWYVDGVEVHNAKTKPREEQYNSTYRVVSVLTVLHQDWLNGKEYKCKVSNKALPAPIEKTISKAKGQPREPQVYTLPPSRDELTKNQVSLTCLVKGFYPSDIAVEWESNGQPENNYKTTPPVLDSDGSFFLYSKLTVDKSRWQQGNVFSCSVMHEALHNHYTQKSLSLSPGK

SEQ ID NO: 11 - protein, 327 aa, Homo sapiens
  REGION 1..327: note = Description of sequence: Homo sapiens IgG4 (partial sequence)
ASTKGPSVFPLAPCSRSTSESTAALGCLVKDYFPEPVTVSWNSGALTSGVHTFPAVLQSSGLYSLSSVVTVPSSSLGTKTYTCNVDHKPSNTKVDKRVESKYGPPCPSCPAPEFLGGPSVFLFPPKPKDTLMISRTPEVTCVVVDVSQEDPEVQFNWYVDGVEVHNAKTKPREEQFNSTYRVVSVLTVLHQDWLNGKEYKCKVSNKGLPSSIEKTISKAKGQPREPQVYTLPPSQEEMTKNQVSLTCLVKGFYPSDIAVEWESNGQPENNYKTTPPVLDSDGSFFLYSRLTVDKSRWQEGNVFSCSVMHEALHNHYTQKSLSLSLGK

SEQ ID NO: 12 - protein, 223 aa, Homo sapiens
  REGION 1..223: note = Description of sequence: Homo sapiens IgG4 (partial sequence) Segment
PPCPSCPAPEFLGGPSVFLFPPKPKDTLMISRTPEVTCVVVDVSQEDPEVQFNWYVDGVEVHNAKTKPREEQFNSTYRVVSVLTVLHQDWLNGKEYKCKVSNKGLPSSIEKTISKAKGQPREPQVYTLPPSQEEMTKNQVSLTCLVKGFYPSDIAVEWESNGQPENNYKTTPPVLDSDGSFFLYSRLTVDKSRWQEGNVFSCSVMHEALHNHYTQKSLSLSPG

SEQ ID NO: 13 - protein, 453 aa, Homo sapiens
  REGION 1..453: note = Description of sequence: Homo sapiens IgM (partial sequence)
GSASAPTLFPLVSCENSPSDTSSVAVGCLAQDFLPDSITFSWKYKNNSDISSTRGFPSVLRGGKYAATSQVLLPSKDVMQGTDEHVVCKVQHPNGNKEKNVPLPVIAELPPKVSVFVPPRDGFFGNPRKSKLICQATGFSPRQIQVSWLREGKQVGSGVTTDQVQAEAKESGPTTYKVTSTLTIKESDWLGQSMFTCRVDHRGLTFQQNASSMCVPDQDTAIRVFAIPPSFASIFLTKSTKLTCLVTDLTTYDSVTISWTRQNGEAVKTHTNISESHPNATFSAVGEASICEDDWNSGERFTCTVTHTDLPSPLKQTISRPKGVALHRPDVYLLPPAREQLNLRESATITCLVTGFSPADVFVQWMQRGQPLSPEKYVTSAPMPEPQAPGRYFAHSILTVSEEEWNTGETYTCVVAHEALPNRVTERTVDKSTGKPTLYNVSLVMSDTAGTCY

SEQ ID NO: 14 - protein, 159 aa, Homo sapiens
  REGION 1..159: note = Description of sequence: Homo sapian Ig J-chain (amino acids 23-259)
MKNHLLFWGVLAVFIKAVHVKAQEDERIVLVDNKCKCARITSRIIRSSEDPNEDIVERNIRIIVPLNNRENISDPTSPLRTRFVYHLSDLCKKCDPTEVELDNQIVTATQSNICDEDSATETCYTYDRNKCYTAVVPLVYGGETKMVETALTPDACYPD

SEQ ID NO: 15 - protein, 112 aa, Homo sapiens
  REGION 1..112: note = Description of sequence: Ig CH1 domain
FTVRETASTKGPSVFPLAPSSKSTSGGTAALGCLVKDYFPEPVTVSWNSGALTSGVHTFPAVLQSSGLYSLSSVVTVPSSSLGTQTYICNVNHKPSNTKVDKKVEPKSCDKT

SEQ ID NO: 16 - protein, 106 aa, Homo sapiens
  REGION 1..106: note = Description of sequence: Ig ? chain constant region
TVAAPSVFIFPPSDEQLKSGTASVVCLLNNFYPREAKVQWKVDNALQSGNSQESVTEQDSKDSTYSLSSTLTLSKADYEKHKVYACEVTHQGLSSPVTKSFNRGEC

SEQ ID NO: 17 - protein, 106 aa, Homo sapiens
  REGION 1..106: note = Description of sequence: Ig ? chain constant region
GQPKANPTVTLFPPSSEELQANKATLVCLISDFYPGAVTVAWKADGSPVKAGVETTKPSKQSNNKYAASSYLSLTPEQWKSHRSYSCQVTHEGSTVEKTVAPTECS

SEQ ID NO: 18 - protein, 365 aa, Homo sapiens
  REGION 1..365: note = Description of sequence: Homo sapiens HLA-A*01:01:01:01
MAVMAPRTLLLLLSGALALTQTWAGSHSMRYFFTSVSRPGRGEPRFIAVGYVDDTQFVRFDSDAASQKMEPRAPWIEQEGPEYWDQETRNMKAHSQTDRANLGTLRGYYNQSEDGSHTIQIMYGCDVGPDGRFLRGYRQDAYDGKDYIALNEDLRSWTAADMAAQITKRKWEAVHAAEQRRVYLEGRCVDGLRRYLENGKETLQRTDPPKTHMTHHPISDHEATLRCWALGFYPAEITLTWQRDGEDQTQDTELVETRPAGDGTFQKWAAVVVPSGEEQRYTCHVQHEGLPKPLTLRWELSSQPTIPIVGIIAGLVLLGAVITGAVVAAVMWRRKSSDRKGGSYTQAASSDSAQGSDVSLTACKV

SEQ ID NO: 19 - protein, 365 aa, Homo sapiens
  REGION 1..365: note = Description of sequence: Homo sapiens HLA-A*1101
MAVMAPRTLLLLLSGALALTQTWAGSHSMRYFYTSVSRPGRGEPRFIAVGYVDDTQFVRFDSDAASQRMEPRAPWIEQEGPEYWDQETRNVKAQSQTDRVDLGTLRGYYNQSEDGSHTIQIMYGCDVGPDGRFLRGYRQDAYDGKDYIALNEDLRSWTAADMAAQITKRKWEAAHAAEQQRAYLEGRCVEWLRRYLENGKETLQRTDPPKTHMTHHPISDHEATLRCWALGFYPAEITLTWQRDGEDQTQDTELVETRPAGDGTFQKWAAVVVPSGEEQRYTCHVQHEGLPKPLTLRWELSSQPTIPIVGIIAGLVLLGAVITGAVVAAVMWRRKSSDRKGGSYTQAASSDSAQGSDVSLTACKV

SEQ ID NO: 20 - protein, 365 aa, Homo sapiens [sequence omitted]

SEQ ID NO: 21 - protein, 365 aa, Homo sapiens [sequence omitted]

SEQ ID NO: 22 - protein, 362 aa, Homo sapiens
  REGION 1..362: note = Description of sequence: Homo sapiens HLA-B*07:02:01
MLVMAPRTVLLLLSAALALTETWAGSHSMRYFYTSVSRPGRGEPRFISVGYVDDTQFVRFDSDAASPREEPRAPWIEQEGPEYWDRNTQIYKAQAQTDRESLRNLRGYYNQSEAGSHTLQSMYGCDVGPDGRLLRGHDQYAYDGKDYIALNEDLRSWTAADTAAQITQRKWEAAREAEQRRAYLEGECVEWLRRYLENGKDKLERADPPKTHVTHHPISDHEATLRCWALGFYPAEITLTWQRDGEDQTQDTELVETRPAGDRTFQKWAAVVVPSGEEQRYTCHVQHEGLPKPLTLRWEPSSQSTVPIVGIVAGLAVLAVVVIGAVVAAVMCRRKSSGGKGGSYSQAACSDSAQGSDVSLTA

SEQ ID NO: 23 - protein, 365 aa, Homo sapiens
  REGION 1..365: note = Description of sequence: Homo sapiens HLA-C*701 (HLA-C*07:01)
MRVMAPRALLLLLSGGLALTETWACSHSMRYFDTAVSRPGRGEPRFISVGYVDDTQFVRFDSDAASPRGEPRAPWVEQEGPEYWDRETQNYKRQAQADRVSLRNLRGYYNQSEDGSHTLQRMYGCDLGPDGRLLRGYDQSAYDGKDYIALNEDLRSWTAADTAAQITQRKLEAARAAEQLRAYLEGTCVEWLRRYLENGKETLQRAEPPKTHVTHHPLSDHEATLRCWALGFYPAEITLTWQRDGEDQTQDTELVETRPAGDGTFQKWAAVVVPSGQEQRYTCHMQHEGLQEPLTLSWEPSSQPTIPIMGIVAGLAVLVVLAVLGAVVTAMMCRRKSSGGKGGSCSQAACSNSAQGSDESLITCK

SEQ ID NO: 24 - protein, 276 aa, Homo sapiens
  REGION 1..276: note = Description of sequence: human HLA-A*0101
GSHSMRYFFTSVSRPGRGEPRFIAVGYVDDTQFVRFDSDAASQKMEPRAPWIEQEGPEYWDQETRNMKAHSQTDRANLGTLRGYYNQSEDGSHTIQIMYGCDVGPDGRFLRGYRQDAYDGKDYIALNEDLRSWTAADMAAQITKRKWEAVHAAEQRRVYLEGRCVDGLRRYLENGKETLQRTDPPKTHMTHHPISDHEATLRCWALGFYPAEITLTWQRDGEDQTQDTELVETRPAGDGTFQKWAAVVVPSGEEQRYTCHVQHEGLPKPLTLRWEL

SEQ ID NO: 25 - protein, 275 aa, Homo sapiens
  REGION 1..275: note = Description of sequence: HLA-B*0702
GSHSMRYFYTSVSRPGRGEPRFISVGYVDDTQFVRFDSDAASPREEPRAPWIEQEGPEYWDRNTQIYKAQAQTDRESLRNLRGYYNQSEAGSHTLQSMYGCDVGPDGRLLRGHDQYAYDGKDYIALNEDLRSWTAADTAAQITQRKWEAAREAEQRRAYLEGECVEWLRRYLENGKDKLERADPPKTHVTHHPISDHEATLRCWALGFYPAEITLTWQRDGEDQTQDTELVETRPAGDRTFQKWAAVVVPSGEEQRYTCHVQHEGLPKPLTLRWE

SEQ ID NO: 26 - protein, 275 aa, Homo sapiens
  REGION 1..275: note = Description of sequence: HLA-C (HLA-C*0701)
CSHSMRYFDTAVSRPGRGEPRFISVGYVDDTQFVRFDSDAASPRGEPRAPWVEQEGPEYWDRETQNYKRQAQADRVSLRNLRGYYNQSEDGSHTLQRMYGCDLGPDGRLLRGYDQSAYDGKDYIALNEDLRSWTAADTAAQITQRKLEAARAAEQLRAYLEGTCVEWLRRYLENGKETLQRAEPPKTHVTHHPLSDHEATLRCWALGFYPAEITLTWQRDGEDQTQDTELVETRPAGDGTFQKWAAVVVPSGQEQRYTCHMQHEGLQEPLTLSWE

SEQ ID NO: 27 - protein, 276 aa, Homo sapiens [sequence omitted]

SEQ ID NO: 28 - protein, 273 aa, Homo sapiens
  REGION 1..273: note = Description of sequence: mouse H2K protein sequence
GPHSLRYFVTAVSRPGLGEPRFIAVGYVDDTQFVRFDSDADNPRFEPRAPWMEQEGPEYWEEQTQRAKSDEQWFRVSLRTAQRYYNQSKGGSHTFQRMFGCDVGSDWRLLRGYQQFAYDGRDYIALNEDLKTWTAADTAALITRRKWEQAGDAEYYRAYLEGECVEWLRRYLELGNETLRTDSPKAHVTYHPRSQVDVTLRCWALGFYPADITLTWQLNGEDLTQDMELVETRPAGDGTFQKWAAVVVPLGKEQNYTCHVHHKGLPEPLTLRW

SEQ ID NO: 29 - protein, 275 aa, Homo sapiens
  REGION 1..275: note = Description of sequence: HLA-A (var.2)
GSHSMRYFFTSVSRPGRGEPRFIAVGYVDDTQFVRFDSDAASQRMEPRAPWIEQEGPEYWDGETRKVKAHSQTHRVDLGTLRGAYNQSEAGSHTVQRMYGCDVGSDWRFLRGYHQYAYDGKDYIALKEDLRSWTAADMAAQTTKHKWEAAHVAEQLRAYLEGTCVEWLRRYLENGKETLQRTDAPKTHMTHHAVSDHEATLRCWALSFYPAEITLTWQRDGEDQTQDTELVETRPCGDGTFQKWAAVVVPSGQEQRYTCHVQHEGLPKPLTLRWE

SEQ ID NO: 30 - protein, 275 aa, Homo sapiens
  REGION 1..275: note = Description of sequence: HLA-A (var.2C)
GSHSMRYFFTSVSRPGRGEPRFIAVGYVDDTQFVRFDSDAASQRMEPRAPWIEQEGPEYWDGETRKVKAHSQTHRVDLGTLRGCYNQSEAGSHTVQRMYGCDVGSDWRFLRGYHQYAYDGKDYIALKEDLRSWTAADMCAQTTKHKWEAAHVAEQLRAYLEGTCVEWLRRYLENGKETLQRTDAPKTHMTHHAVSDHEATLRCWALSFYPAEITLTWQRDGEDQTQDTELVETRPCGDGTFQKWAAVVVPSGQEQRYTCHVQHEGLPKPLTLRWE

SEQ ID NO: 31 - protein, 276 aa, Homo sapiens
  REGION 1..276: note = Description of sequence: HLA-A (var.2CP)
GSHSMRYFFTSVSRPGRGEPRFIAVGYVDDTQFVRFDSDAASQRMEPRAPWIEQEGPEYWDGETRKVKAHSQTHRVDLGTLRGAYNQSEAGSHTVQRMYGCDVGSDWRFLRGYHQYAYDGKDYIALKEDLRSWTAADMAAQTTKHKWEAAHVAEQLRAYLEGTCVEWLRRYLENGKETLQRTDAPKTHMTHHAVSDHEATLRCWALSFYPAEITLTWQRDGEDQTQDTELVETRPCGDGTFQKWAAVVVPSGQEQRYTCHVQHEGLPKPLTLRWEP

SEQ ID NO: 32 - protein, 276 aa, Homo sapiens
  REGION 1..276: note = Description of sequence: (HLA-A*1101 (HLA-A11)
GSHSMRYFYTSVSRPGRGEPRFIAVGYVDDTQFVRFDSDAASQRMEPRAPWIEQEGPEYWDQETRNVKAQSQTDRVDLGTLRGYYNQSEDGSHTIQIMYGCDVGPDGRFLRGYRQDAYDGKDYIALNEDLRSWTAADMAAQITKRKWEAAHAAEQQRAYLEGRCVEWLRRYLENGKETLQRTDPPKTHMTHHPISDHEATLRCWALGFYPAEITLTWQRDGEDQTQDTELVETRPAGDGTFQKWAAVVVPSGEEQRYTCHVQHEGLPKPLTLRWEL

SEQ ID NO: 33 - protein, 276 aa, Homo sapiens
  REGION 1..276: note = Description of sequence: HLA-A*2402 (HLA-A24)
GSHSMRYFSTSVSRPGRGEPRFIAVGYVDDTQFVRFDSDAASQRMEPRAPWIEQEGPEYWDEETGKVKAHSQTDRENLRIALRYYNQSEAGSHTLQMMFGCDVGSDGRFLRGYHQYAYDGKDYIALKEDLRSWTAADMAAQITKRKWEAAHVAEQQRAYLEGTCVDGLRRYLENGKETLQRTDPPKTHMTHHPISDHEATLRCWALGFYPAEITLTWQRDGEDQTQDTELVETRPAGDGTFQKWAAVVVPSGEEQRYTCHVQHEGLPKPLTLRWEP

SEQ ID NO: 34 - protein, 276 aa, Homo sapiens
  REGION 1..276: note = Description of sequence: HLA-A*3303 (HLA-A33)
GSHSMRYFTTSVSRPGRGEPRFIAVGYVDDTQFVRFDSDAASQRMEPRAPWIEQEGPEYWDRNTRNVKAHSQIDRVDLGTLRGYYNQSEAGSHTIQMMYGCDVGSDGRFLRGYQQDAYDGKDYIALNEDLRSWTAADMAAQITQRKWEAARVAEQLRAYLEGTCVEWLRRYLENGKETLQRTDPPKTHMTHHAVSDHEATLRCWALSFYPAEITLTWQRDGEDQTQDTELVETRPAGDGTFQKWASVVVPSGQEQRYTCHVQHEGLPKPLTLRWEP

SEQ ID NO: 35 - protein, 276 aa, Homo sapiens
  REGION 1..276: note = Description of sequence: HLA-A*0301
GSHSMRYFFTSVSRPGRGEPRFIAVGYVDDTQFVRFDSDAASQRMEPRAPWIEQEGPEYWDQETRNVKAQSQTDRVDLGTLRGYYNQSEAGSHTIQIMYGCDVGSDGRFLRGYRQDAYDGKDYIALNEDLRSWTAADMAAQITKRKWEAAHEAEQLRAYLDGTCVEWLRRYLENGKETLQRTDPPKTHMTHHPISDHEATLRCWALGFYPAEITLTWQRDGEDQTQDTELVETRPAGDGTFQKWAAVVVPSGEEQRYTCHVQHEGLPKPLTLRWEL

SEQ ID NO: 36 - protein, 276 aa, Homo sapiens
  REGION 1..276: note = Description of sequence: HLA-A*2301
GSHSMRYFSTSVSRPGRGEPRFIAVGYVDDTQFVRFDSDAASQRMEPRAPWIEQEGPEYWDEETGKVKAHSQTDRENLRIALRYYNQSEAGSHTLQMMFGCDVGSDGRFLRGYHQYAYDGKDYIALKEDLRSWTAADMAAQITQRKWEAARVAEQLRAYLEGTCVDGLRRYLENGKETLQRTDPPKTHMTHHPISDHEATLRCWALGFYPAEITLTWQRDGEDQTQDTELVETRPAGDGTFQKWAAVVVPSGEEQRYTCHVQHEGLPKPLTLRWEP

SEQ ID NO: 37 - protein, 276 aa, Homo sapiens
  REGION 1..276: note = Description of sequence: HLA-A*2407
GSHSMRYFSTSVSRPGRGEPRFIAVGYVDDTQFVRFDSDAASQRMEPRAPWIEQEGPEYWDEETGKVKAQSQTDRENLRIALRYYNQSEAGSHTLQMMFGCDVGSDGRFLRGYHQYAYDGKDYIALKEDLRSWTAADMAAQITKRKWEAAHVAEQQRAYLEGTCVDGLRRYLENGKETLQRTDPPKTHMTHHPISDHEATLRCWALGFYPAEITLTWQRDGEDQTQDTELVETRPAGDGTFQKWAAVVVPSGEEQRYTCHVQHEGLPKPLTLRWEP

SEQ ID NO: 38 - protein, 276 aa, Homo sapiens
  REGION 1..276: note = Description of sequence: HLA-A*3401
GSHSMRYFYTSVSRPGRGEPRFIAVGYVDDTQFVRFDSDAASQRMEPRAPWIEQEGPEYWDRNTRKVKAQSQTDRVDLGTLRGYYNQSEDGSHTIQRMYGCDVGPDGRFLRGYQQDAYDGKDYIALNEDLRSWTAADMAAQITQRKWETAHEAEQWRAYLEGTCVEWLRRYLENGKETLQRTDAPKTHMTHHAVSDHEATLRCWALSFYPAEITLTWQRDGEDQTQDTELVETRPAGDGTFQKWASVVVPSGQEQRYTCHVQHEGLPKPLTLRWEP

SEQ ID NO: 39 - protein, 276 aa, Homo sapiens
  REGION 1..276: note = Description of sequence: HLA-A allele consensus sequence
  VARIANT 9: note = Xaa can be F, Y, S, or T
  VARIANT 44: note = Xaa can be K or R
  VARIANT 62: note = Xaa can be Q, G, E, or R
  VARIANT 63: note = Xaa can be N or E
  VARIANT 65: note = Xaa can be R or G
  VARIANT 66: note = Xaa can be N or K
  VARIANT 67: note = Xaa can be M or V
  VARIANT 70: note = Xaa can be H or Q
  VARIANT 73: note = Xaa can be T or I
  VARIANT 74: note = Xaa can be D or H
  VARIANT 76: note = Xaa can be A, V, or E
  VARIANT 79: note = Xaa can be G or R
  VARIANT 80: note = Xaa can be T or I
  VARIANT 81: note = Xaa can be L or A
  VARIANT 82: note = Xaa can be R or L
  VARIANT 83: note = Xaa can be G or R
  VARIANT 90: note = Xaa can be A or D
  VARIANT 95: note = Xaa can be I, L, or V
  VARIANT 97: note = Xaa can be I, R or M
  VARIANT 99: note = Xaa can be F or Y
  VARIANT 105: note = Xaa can be S or P
  VARIANT 107: note = Xaa can be W or G
  VARIANT 114: note = Xaa can be R, H, or Q
  VARIANT 116: note = Xaa can be D or Y
  VARIANT 127: note = Xaa can be N or K
  VARIANT 142: note = Xaa can be T or I
  VARIANT 144: note = Xaa can be K or Q
  VARIANT 145: note = Xaa can be R or H
  VARIANT 149: note = Xaa can be A or T
  VARIANT 150: note = Xaa can be A or V
  VARIANT 151: note = Xaa can be H or R
  VARIANT 156: note = Xaa can be R, L, Q, or W
  VARIANT 158: note = Xaa can be V or A
  VARIANT 161: note = Xaa can be D or E
  VARIANT 163: note = Xaa can be R or T
  VARIANT 166: note = Xaa can be D or E
  VARIANT 167: note = Xaa can be W or G
  VARIANT 184: note = Xaa can be P or A
  VARIANT 193: note = Xaa can be P or A
  VARIANT 194: note = Xaa can be V or I
  VARIANT 207: note = Xaa can be S or G
  VARIANT 246: note = Xaa can be A or S
  VARIANT 276: note = Xaa can be P or L
GSHSMRYFXTSVSRPGRGEPRFIAVGYVDDTQFVRFDSDAASQXMEPRAPWIEQEGPEYWDXXTXXXKAXSQXXRXBLXXXXXYYNQSEXGSHTXQXMXGCDVGXDXRFLRGYXQXAYDGKDYIALXEDLRSWTAADMAAQXTXXKWEXXXEAEQXRXYLXGXCVXXLRRYLENGKETLQRTDXPKTHMTHHXXSDHEATLRCWALXFYPAEITLTWQRDGEDQTQDTELVETRPAGDGTFQKWAXVVVPSGZEQRYTCHVQHEGLPKPLTLRWEX

SEQ ID NO: 40 - protein, 276 aa, Homo sapiens [sequence omitted]

SEQ ID NO: 41 - protein, 276 aa, Homo sapiens
  REGION 1..276: note = Description of sequence: HLA-B*0801
GSHSMRYFDTAMSRPGRGEPRFISVGYVDDTQFVRFDSDAASPREEPRAPWIEQEGPEYWDRNTQIFKTNTQTDRESLRNLRGYYNQSEAGSHTLQSMYGCDVGPDGRLLRGHNQYAYDGKDYIALNEDLRSWTAADTAAQITQRKWEAARVAEQDRAYLEGTCVEWLRRYLENGKDTLERADPPKTHVTHHPISDHEATLRCWALGFYPAEITLTWQRDGEDQTQDTELVETRPAGDRTFQKWAAVVVPSGEEQRYTCHVQHEGLPKPLTLRWEP

SEQ ID NO: 42 - protein, 276 aa, Homo sapiens
  REGION 1..276: note = Description of sequence: HLA-B*1502
GSHSMRYFYTAMSRPGRGEPRFIAVGYVDDTQFVRFDSDAASPRMAPRAPWIEQEGPEYWDRNTQISKTNTQTYRESLRNLRGYYNQSEAGSHIIQRMYGCDVGPDGRLLRGYDQSAYDGKDYIALNEDLSSWTAADTAAQITQRKWEAAREAEQLRAYLEGLCVEWLRRYLENGKETLQRADPPKTHVTHHPISDHEATLRCWALGFYPAEITLTWQRDGEDQTQDTELVETRPAGDRTFQKWAAVVVPSGEEQRYTCHVQHEGLPKPLTLRWEP

SEQ ID NO: 43 - protein, 276 aa, Homo sapiens
  REGION 1..276: note = Description of sequence: HLA-B*3802
GSHSMRYFYTSVSRPGRGEPRFISVGYVDDTQFVRFDSDAASPREEPRAPWIEQEGPEYWDRNTQICKTNTQTYRENLRTALRYYNQSEAGSHTLQRMYGCDVGPDGRLLRGHNQFAYDGKDYIALNEDLSSWTAADTAAQITQRKWEAARVAEQLRTYLEGTCVEWLRRYLENGKETLQRADPPKTHVTHHPISDHEATLRCWALGFYPAEITLTWQRDGEDQTQDTELVETRPAGDRTFQKWAAVVVPSGEEQRYTCHVQHEGLPKPLTLRWEP

SEQ ID NO: 44 - protein, 276 aa, Homo sapiens
  REGION 1..276: note = Description of sequence: HLA-B*4001
GSHSMRYFHTAMSRPGRGEPRFITVGYVDDTLFVRFDSDATSPRKEPRAPWIEQEGPEYWDRETQISKTNTQTYRESLRNLRGYYNQSEAGSHTLQRMYGCDVGPDGRLLRGHNQYAYDGKDYIALNEDLRSWTAADTAAQISQRKLEAARVAEQLRAYLEGECVEWLRRYLENGKDKLERADPPKTHVTHHPISDHEATLRCWALGFYPAEITLTWQRDGEDQTQDTELVETRPAGDRTFQKWAAVVVPSGEEQRYTCHVQHEGLPKPLTLRWEP

SEQ ID NO: 45 - protein, 276 aa, Homo sapiens
  REGION 1..276: note = Description of sequence: HLA-B*4601
GSHSMRYFYTAMSRPGRGEPRFIAVGYVDDTQFVRFDSDAASPRMAPRAPWIEQEGPEYWDRETQKYKRQAQTDRVSLRNLRGYYNQSEAGSHTLQRMYGCDVGPDGRLLRGHDQSAYDGKDYIALNEDLSSWTAADTAAQITQRKWEAAREAEQWRAYLEGLCVEWLRRYLENGKETLQRADPPKTHVTHHPISDHEATLRCWALGFYPAEITLTWQRDGEDQTQDTELVETRPAGDRTFQKWAAVVVPSGEEQRYTCHVQHEGLPKPLTLRWEP

SEQ ID NO: 46 - protein, 276 aa, Homo sapiens
  REGION 1..276: note = Description of sequence: HLA-B*5301
GSHSMRYFYTAMSRPGRGEPRFIAVGYVDDTQFVRFDSDAASPRTEPRAPWIEQEGPEYWDRNTQIFKTNTQTYRENLRIALRYYNQSEAGSHIIQRMYGCDLGPDGRLLRGHDQSAYDGKDYIALNEDLSSWTAADTAAQITQRKWEAARVAEQLRAYLEGLCVEWLRRYLENGKETLQRADPPKTHVTHHPVSDHEATLRCWALGFYPAEITLTWQRDGEDQTQDTELVETRPAGDRTFQKWAAVVVPSGEEQRYTCHVQHEGLPKPLTLRWEP

SEQ ID NO: 47 - protein, 276 aa, Homo sapiens
  REGION 1..276: note = Description of sequence: HLA-B allele consensus sequence
  VARIANT 9: note = Xaa can be can be H, Y, or D
  VARIANT 11: note = Xaa can be A or S
  VARIANT 12: note = Xaa can be M or V
  VARIANT 24: note = Xaa can be A, S, or T
  VARIANT 32: note = Xaa can be Q or L
  VARIANT 41: note = Xaa can be A or T
  VARIANT 45: note = Xaa can be E, M, K, or T
  VARIANT 46: note = Xaa can be A or T
  VARIANT 63: note = Xaa can be E or N
  VARIANT 66: note = Xaa can be I or K
  VARIANT 67: note = Xaa can be Y, F, S, or C
  VARIANT 70: note = Xaa can be N or Q
  VARIANT 71: note = Xaa can be A or T
  VARIANT 74: note = Xaa can be D or Y
  VARIANT 76: note = Xaa can be E or V
  VARIANT 77: note = Xaa can be S or N
  VARIANT 80: note = Xaa can be T, N, or I
  VARIANT 81: note = Xaa can be A or L
  VARIANT 82: note = Xaa can be L, or R
  VARIANT 83: note = Xaa can be R or G
  VARIANT 94: note = Xaa can be T or I
  VARIANT 95: note = Xaa can be L or I
  VARIANT 97: note = Xaa can be R or S
  VARIANT 131: note = Xaa can be R or S
  VARIANT 143: note = Xaa can be S or T
  VARIANT 147: note = Xaa can be L or W
  VARIANT 152: note = Xaa can be E OR V
  VARIANT 156: note = Xaa can be R, D, L or W
  VARIANT 158: note = Xaa can be A or T
  VARIANT 163: note = Xaa can be L, E or T
  VARIANT 177: note = Xaa can be E or D
  VARIANT 178: note = Xaa can be K or T
  VARIANT 194: note = Xaa can be I or V
GSHSMRYFXTXXSRPGRGEPRFIXVGYVDDTXFVRFDSDAXSPRXXPRAPWIEQEGPEYWDRXTQXXKTXXTQXYXXNLXXXXYYNQSEAGSHXXQXMYGCDLGPDGRLLRGHDQSAYDGKDYIALNEDLXSWTAADTAAQIXQRKXEAARXAEQXRXYLEGXCVEWLRRYLENGKXXLZRADPPKTHVTHHPXSDHEATLRCWALGFYPAEITLTWQRDGEDQTQDTELVETRPAGDRTFQKWAAVVVPSGEEQRYTCHVQHEGLPKPLTLRWEP

SEQ ID NO: 48 - protein, 276 aa, Homo sapiens
  REGION 1..276: note = Description of sequence: HLA-C*0102
CSHSMKYFFTSVSRPGRGEPRFISVGYVDDTQFVRFDSDAASPRGEPRAPWVEQEGPEYWDRETQKYKRQAQTDRVSLRNLRGYYNQSEAGSHTLQWMCGCDLGPDGRLLRGYDQYAYDGKDYIALNEDLRSWTAADTAAQITQRKWEAAREAEQRRAYLEGTCVEWLRRYLENGKETLQRAEHPKTHVTHHPVSDHEATLRCWALGFYPAEITLTWQWDGEDQTQDTELVETRPAGDGTFQKWAAVMVPSGEEQRYTCHVQHEGLPEPLTLRWEP

SEQ ID NO: 49 - protein, 276 aa, Homo sapiens
  REGION 1..276: note = Description of sequence: HLA-C*0303
GSHSMRYFYTAVSRPGRGEPHFIAVGYVDDTQFVRFDSDAASPRGEPRAPWVEQEGPEYWDRETQKYKRQAQTDRVSLRNLRGYYNQSEARSHIIQRMYGCDVGPDGRLLRGYDQYAYDGKDYIALNEDLRSWTAADTAAQITQRKWEAAREAEQLRAYLEGLCVEWLRRYLKNGKETLQRAEHPKTHVTHHPVSDHEATLRCWALGFYPAEITLTWQWDGEDQTQDTELVETRPAGDGTFQKWAAVVVPSGEEQRYTCHVQHEGLPEPLTLRWEP

SEQ ID NO: 50 - protein, 276 aa, Homo sapiens
  REGION 1..276: note = Description of sequence: HLA-C*0304
GSHSMRYFYTAVSRPGRGEPHFIAVGYVDDTQFVRFDSDAASPRGEPRAPWVEQEGPEYWDRETQKYKRQAQTDRVSLRNLRGYYNQSEAGSHIIQRMYGCDVGPDGRLLRGYDQYAYDGKDYIALNEDLRSWTAADTAAQITQRKWEAAREAEQLRAYLEGLCVEWLRRYLKNGKETLQRAEHPKTHVTHHPVSDHEATLRCWALGFYPAEITLTWQWDGEDQTQDTELVETRPAGDGTFQKWAAVVVPSGEEQRYTCHVQHEGLPEPLTLRWEP

SEQ ID NO: 51 - protein, 276 aa, Homo sapiens
  REGION 1..276: note = Description of sequence: HLA-C*0401
GSHSMRYFSTSVSWPGRGEPRFIAVGYVDDTQFVRFDSDAASPRGEPREPWVEQEGPEYWDRETQKYKRQAQADRVNLRKLRGYYNQSEDGSHTLQRMFGCDLGPDGRLLRGYNQFAYDGKDYIALNEDLRSWTAADTAAQITQRKWEAAREAEQRRAYLEGTCVEWLRRYLENGKETLQRAEHPKTHVTHHPVSDHEATLRCWALGFYPAEITLTWQWDGEDQTQDTELVETRPAGDGTFQKWAAVVVPSGEEQRYTCHVQHEGLPEPLTLRWKP

SEQ ID NO: 52 - protein, 276 aa, Homo sapiens
  REGION 1..276: note = Description of sequence: HLA-C*0602
CSHSMRYFDTAVSRPGRGEPRFISVGYVDDTQFVRFDSDAASPRGEPRAPWVEQEGPEYWDRETQKYKRQAQADRVNLRKLRGYYNQSEDGSHTLQWMYGCDLGPDGRLLRGYDQSAYDGKDYIALNEDLRSWTAADTAAQITQRKWEAAREAEQWRAYLEGTCVEWLRRYLENGKETLQRAEHPKTHVTHHPVSDHEATLRCWALGFYPAEITLTWQRDGEDQTQDTELVETRPAGDGTFQKWAAVVVPSGEEQRYTCHVQHEGLPEPLTLRWEP

SEQ ID NO: 53 - protein, 276 aa, Homo sapiens
  REGION 1..276: note = Description of sequence: HLA-C*0701
CSHSMRYFDTAVSRPGRGEPRFISVGYVDDTQFVRFDSDAASPRGEPRAPWVEQEGPEYWDRETQNYKRQAQADRVSLRNLRGYYNQSEDGSHTLQRMYGCDLGPDGRLLRGYDQSAYDGKDYIALNEDLRSWTAADTAAQITQRKLEAARAAEQLRAYLEGTCVEWLRRYLENGKETLQRAEPPKTHVTHHPLSDHEATLRCWALGFYPAEITLTWQRDGEDQTQDTELVETRPAGDGTFQKWAAVVVPSGQEQRYTCHMQHEGLQEPLTLSWEP

SEQ ID NO: 54 - protein, 276 aa, Homo sapiens
  REGION 1..276: note = Description of sequence: HLA-C*0702
CSHSMRYFDTAVSRPGRGEPRFISVGYVDDTQFVRFDSDAASPRGEPRAPWVEQEGPEYWDRETQKYKRQAQADRVSLRNLRGYYNQSEDGSHTLQRMSGCDLGPDGRLLRGYDQSAYDGKDYIALNEDLRSWTAADTAAQITQRKLEAARAAEQLRAYLEGTCVEWLRRYLENGKETLQRAEPPKTHVTHHPLSDHEATLRCWALGFYPAEITLTWQRDGEDQTQDTELVETRPAGDGTFQKWAAVVVPSGQEQRYTCHMQHEGLQEPLTLSWEP

SEQ ID NO: 55 - protein, 276 aa, Homo sapiens
  REGION 1..276: note = Description of sequence: HLA-C*0801
CSHSMRYFYTAVSRPGRGEPRFIAVGYVDDTQFVQFDSDAASPRGEPRAPWVEQEGPEYWDRETQKYKRQAQTDRVSLRNLRGYYNQSEAGSHTLQRMYGCDLGPDGRLLRGYNQFAYDGKDYIALNEDLRSWTAADTAAQITQRKWEAARTAEQLRAYLEGTCVEWLRRYLENGKKTLQRAEHPKTHVTHHPVSDHEATLRCWALGFYPAEITLTWQRDGEDQTQDTELVETRPAGDGTFQKWAAVVVPSGEEQRYTCHVQHEGLPEPLTLRWGP

SEQ ID NO: 56 - protein, 276 aa, Homo sapiens
  REGION 1..276: note = Description of sequence: HLA-C*1502
CSHSMRYFYTAVSRPGRGEPHFIAVGYVDDTQFVRFDSDAASPRGEPRAPWVEQEGPEYWDRETQNYKRQAQTDRVNLRKLRGYYNQSEAGSHIIQRMYGCDLGPDGRLLRGHDQLAYDGKDYIALNEDLRSWTAADTAAQITQRKWEAAREAEQLRAYLEGTCVEWLRRYLENGKETLQRAEHPKTHVTHHPVSDHEATLRCWALGFYPAEITLTWQRDGEDQTQDTELVETRPAGDGTFQKWAAVVVPSGEEQRYTCHVQHEGLPEPLTLRWEP

SEQ ID NO: 57 - protein, 276 aa, Homo sapiens
  REGION 1..276: note = Description of sequence: HLA-C allele consensus sequence
  VARIANT 1: note = C or G
  VARIANT 6: note = R or K
  VARIANT 9: note = F, Y, S, or D
  VARIANT 14: note = R or W
  VARIANT 21: note = H or R
  VARIANT 24: note = A or S
  VARIANT 35: note = Q or R
  VARIANT 49: note = A or E
  VARIANT 66: note = N or K
  VARIANT 73: note = T or A
  VARIANT 77: note = S or N
  VARIANT 80: note = N or K
  VARIANT 90: note = A or D
  VARIANT 91: note = G or R
  VARIANT 94: note = T or I
  VARIANT 95: note = L or I
  VARIANT 97: note = W or R
  VARIANT 99: note = C, Y, F, or S
  VARIANT 103: note = L, or V
  VARIANT 113: note = Y or H
  VARIANT 116: note = Y, F, S, or L
  VARIANT 147: note = L or W
  VARIANT 152: note = E, A, Or T
  VARIANT 156: note = R, L, or W
  VARIANT 163: note = L or T
  VARIANT 173: note = E OR K
  VARIANT 177: note = E or K
  VARIANT 184: note = H or P
  VARIANT 194: note = R or V
  VARIANT 219: note = W or R
  VARIANT 248: note = V or M
  VARIANT 261: note = M or V
  VARIANT 267: note = P or Q
  VARIANT 273: note = R or S
  VARIANT 275: note = P or G
XSHSMXYFXTAVSXPGRGEPXFIXVGYVDDTQFVXFDSDAASPRGEPRXPWVEQEGPEYWDRETQXYKRQAQXDRVXLRXLRGYYNQSEXXSHXXQXMXGCDXGPDGRLLRGXBQXAYDGKDYIALNEDLRSWTAADTAAQITQRKXEAARXAEQXRAYLEGXCVEWLRRYLXNGKXTLQRAEXPKTHVTHHPXSDHEATLRCWALGFYPAEITLTWQXDGEDQTQDTELVETRPAGDGTFQKWAAVXVPSGZEQRYTCHXQHEGLXEPLTLXWXP

SEQ ID NO: 58 - protein, 284 aa, Homo sapiens
  REGION 1..284: note = Description of sequence: HLA-E allele consensus sequence
  VARIANT 89: note = Xaa can be K or E
  VARIANT 107: note = Xaa can be R or G
  VARIANT 157: note = Xaa can be R or G
  VARIANT 158: note = Xaa can be A or V
  VARIANT 255: note = Xaa can be Q or P
  VARIANT 267: note = Xaa can be P or S
GSHSLKYFHTSVSRPGRGEPRFISVGYVDDTQFVRFDNDAASPRMVPRAPWMEQEGSEYWDRETRSARDTAQIFRVNLRTLRGYYNQSXAGSHTLQWMHGCELGPDXRFLRGYEQFAYDGKDYLTLNEDLRSWTAVDTAAQISEQKSNDASEAEHQXXYLEDTCVEWLHKYLEKGKETLLHLEPPKTHVTHHPISDHEATLRCWALGFYPAEITLTWQQDGEGHTQDTELVETRPAGDGTFQKWAAVVVPSGEEXRYTCHVQHEGLXEPVTLRWKPASQPTIPI

SEQ ID NO: 59 - protein, 284 aa, Homo sapiens
  REGION 1..284: note = Description of sequence: HLA-F allele consensus sequence
  VARIANT 7: note = Xaa can be Y or F
  VARIANT 50: note = Xaa can be P or Q
  VARIANT 251: note = Xaa can be S or P
  VARIANT 278: note = Xaa can be P or L
GSHSLRXFSTAVSRPGRGEPRYIAVEYVDDTQFLRFDSDAAIPRMEPREXWVEQEGPQYWEWTTGYAKANAQTDRVALRNLLRRYNQSEAGSHTLQGMNGCDMGPDGRLLRGYHQHAYDGKDYISLNEDLRSWTAADTVAQITQRFYEAEEYAEEFRTYLEGECLELLRRYLENGKETLQRADPPKAHVAHHPISDHEATLRCWALGFYPAEITLTWQRDGEEQTQDTELVETRPAGDGTFQKWAAVVVPXGEEQRYTCHVQHEGLPQPLILRWEQSXQPTIPI

SEQ ID NO: 60 - protein, 284 aa, Homo sapiens
  REGION 1..284: note = Description of sequence: HLA-G allele consensus sequence
  VARIANT 13: note = S or F
  VARIANT 27: note = Y or H
  VARIANT 31: note = T, S, or M
  VARIANT 34: note = L or V
  VARIANT 54: note = Q or R
  VARIANT 81: note = P or L
  VARIANT 100: note = G or D
  VARIANT 104: note = G or V
  VARIANT 105: note = S or C
  VARIANT 110: note = L or I
  VARIANT 159: note = Y or H
  VARIANT 169: note = H or R
  VARIANT 171: note = Y or H
  VARIANT 178: note = M or T
  VARIANT 185: note = P or A
  VARIANT 219: note = R, W or Q
  VARIANT 258: note = T or M
  VARIANT 275: note = K or E
GSHSMRYFSAAVXRPGRGEPRFIAMGXVDDXQFXRFDSDSACPRMEPRAPWVEXEGPEYWEEETRNTKAHAQTDRMNLQTXRGYYNQSEASSHTLQWMIXCDLXXDGRLXRGYEQYAYDGKDYLALNEDLRSWTAADTAAQISKRKCEAANVAEQRRAXLEGTCVEWLXRXLENGKEXLQRADPXKTHVTHHPVFDYEATLRCWALGFYPAEIILTWQXDGEDQTQDVELVETRPAGDGTFQKWAAVVVPSGEEQRYXCHVQHEGLPEPLMLRWXQSSLPTIPI

SEQ ID NO: 61 - protein, 119 aa, Homo sapiens
  REGION 1..119: note = Description of sequence: Beta-2M precursor Homo sapiens NP_004039.1
  SIGNAL 1..20
MSRSVALAVLALLSLSGLEAIQRTPKIQVYSRHPAENGKSNFLNCYVSGFHPSDIEVDLLKNGERIEKVEHSDLSFSKDWSFYLLYYTEFTPTEKDEYACRVNHVTLSQPKIVKWDRDM

SEQ ID NO: 62 - protein, 119 aa, Pan troglodytes; identical to SEQ ID NO: 61
  REGION 1..119: note = Description of sequence: Beta-2M precursor Pan troglodytes NP_001009066.1
  SIGNAL 1..20

SEQ ID NO: 63 - protein, 119 aa, Macaca mulatta
  REGION 1..119: note = Description of sequence: Beta-2M precursor Macaca mulatta NP_001040602.1
MSRSVALAVLALLSLSGLEAIQRTPKIQVYSRHPPENGKPNFLNCYVSGFHPSDIEVDLLKNGEKMGKVEHSDLSFSKDWSFYLLYYTEFTPNEKDEYACRVNHVTLSGPRTVKWDRDM

SEQ ID NO: 64 - protein, 118 aa, Bos taurus
  REGION 1..118: note = Description of sequence: Beta-2M precursor Bos Taurus NP_776318.1
MARFVALVLLGLLSLSGLDAIQRPPKIQVYSRHPPEDGKPNYLNCYVYGFHPPQIEIDLLKNGEKIKSEQSDLSFSKDWSFYLLSHAEFTPNSKDQYSCRVKHVTLEQPRIVKWDRDL

SEQ ID NO: 65 - protein, 119 aa, Mus musculus
  REGION 1..119: note = Description of sequence: Beta-2M precursor Mus musculus NP_033865.2
MARSVTLVFLVLVSLTGLYAIQKTPQIQVYSRHPPENGKPNILNCYVTQFHPPHIEIQMLKNGKKIPKVEMSDMSFSKDWSFYILAHTEFTPTETDTYACRVKHASMAEPKTVYWDRDM

SEQ ID NO: 66 - protein, 6 aa, synthetic construct
  REGION 1..6: note = Description of sequence: sulfatase motif
  REGION 1: note = Amino acid can be absent
  VARIANT 1: note = Xaa can be any amino acid but usually L, M, V, S or T
  VARIANT 2: note = Can be S or C
  VARIANT 3: note = can be any amino acid but usually S, T, A, V, G or C
  VARIANT 4: note = Can also be A or P
  VARIANT 5: note = can be any amino acid but usually S, T, A, V, G or C
  VARIANT 6: note = Can any basic amino acid (R, K, or H)
XSAAAK

SEQ ID NO: 67-68 - skipped (2 entries)

SEQ ID NO: 69 - protein, 5 aa, synthetic construct
  REGION 1..5: note = Description of sequence: sortase site
  VARIANT 3: note = Xaa can be any naturally occurring amino acid
  VARIANT 5: note = Can be either G or A
LPXTA

SEQ ID NO: 70 - protein, 4 aa, synthetic construct
  REGION 1..4: note = Description of sequence: sortase conjugation partner
GGGG

SEQ ID NO: 71 - protein, 5 aa, synthetic construct
  REGION 1..5: note = Description of sequence: sortase conjugation partner
GGGGG

SEQ ID NO: 72 - protein, 4 aa, synthetic construct
  REGION 1..4: note = Description of sequence: sortase conjugation partner
AAAA

SEQ ID NO: 73 - protein, 5 aa, synthetic construct
  REGION 1..5: note = Description of sequence: sortase conjugation partner
AAAAA

SEQ ID NO: 74 - protein, 6 aa, synthetic construct
  REGION 1..6: note = Description of sequence: sortase site
LPETGG

SEQ ID NO: 75 - protein, 6 aa, synthetic construct
  REGION 1..6: note = Description of sequence: sortase site
LPETAA

SEQ ID NO: 76 - protein, 5 aa, synthetic construct
  REGION 1..5: note = Description of sequence: transglutaminase site
LLQGG

SEQ ID NO: 77 - protein, 4 aa, synthetic construct
  REGION 1..4: note = Description of sequence: transglutaminase site
LLQG

SEQ ID NO: 78 - protein, 6 aa, synthetic construct
  REGION 1..6: note = Description of sequence: transglutaminase site
LSLSQG

SEQ ID NO: 79 - protein, 6 aa, synthetic construct
  REGION 1..6: note = Description of sequence: transglutaminase site
LLQLQG

SEQ ID NO: 80 - protein, 276 aa, Homo sapiens
  REGION 1..276: note = Description of sequence: HLA-B*3501
GSHSMRYFYTAMSRPGRGEPRFIAVGYVDDTQFVRFDSDAASPRTEPRAPWIEQEGPEYWDRNTQIFKTNTQTYRESLRNLRGYYNQSEAGSHIIQRMYGCDLGPDGRLLRGHDQSAYDGKDYIALNEDLSSWTAADTAAQITQRKWEAARVAEQLRAYLEGLCVEWLRRYLENGKETLQRADPPKTHVTHHPVSDHEATLRCWALGFYPAEITLTWQRDGEDQTQDTELVETRPAGDRTFQKWAAVVVPSGEEQRYTCHVQHEGLPKPLTLRWEP

SEQ ID NO: 81 - protein, 276 aa, Homo sapiens
  REGION 1..276: note = Description of sequence: HLA-B*4402
GSHSMRYFYTAMSRPGRGEPRFITVGYVDDTLFVRFDSDATSPRKEPRAPWIEQEGPEYWDRETQISKTNTQTYRENLRTALRYYNQSEAGSHIIQRMYGCDVGPDGRLLRGYDQDAYDGKDYIALNEDLSSWTAADTAAQITQRKWEAARVAEQDRAYLEGLCVESLRRYLENGKETLQRADPPKTHVTHHPISDHEVTLRCWALGFYPAEITLTWQRDGEDQTQDTELVETRPAGDRTFQKWAAVVVPSGEEQRYTCHVQHEGLPKPLTLRWEP

SEQ ID NO: 82 - protein, 276 aa, Homo sapiens
  REGION 1..276: note = Description of sequence: HLA-B*4403
GSHSMRYFYTAMSRPGRGEPRFITVGYVDDTLFVRFDSDATSPRKEPRAPWIEQEGPEYWDRETQISKTNTQTYRENLRTALRYYNQSEAGSHIIQRMYGCDVGPDGRLLRGYDQDAYDGKDYIALNEDLSSWTAADTAAQITQRKWEAARVAEQLRAYLEGLCVESLRRYLENGKETLQRADPPKTHVTHHPISDHEVTLRCWALGFYPAEITLTWQRDGEDQTQDTELVETRPAGDRTFQKWAAVVVPSGEEQRYTCHVQHEGLPKPLTLRWEP

SEQ ID NO: 83 - protein, 276 aa, Homo sapiens
  REGION 1..276: note = Description of sequence: HLA-B*5801
GSHSMRYFYTAMSRPGRGEPRFIAVGYVDDTQFVRFDSDAASPRTEPRAPWIEQEGPEYWDGETRNMKASAQTYRENLRIALRYYNQSEAGSHIIQRMYGCDLGPDGRLLRGHDQSAYDGKDYIALNEDLSSWTAADTAAQITQRKWEAARVAEQLRAYLEGLCVEWLRRYLENGKETLQRADPPKTHVTHHPVSDHEATLRCWALGFYPAEITLTWQRDGEDQTQDTELVETRPAGDRTFQKWAAVVVPSGEEQRYTCHVQHEGLPKPLTLRWEP

SEQ ID NO: 84 - protein, 271 aa, synthetic construct
  REGION 1..271: note = Description of sequence: modified Class I HLA polypeptide
  REGION 79..83: note = Any amino acid can be absent
  REGION 85..89: note = Any amino acid can be absent
  REGION 134..138: note = Any amino acid can be absent
  VARIANT 79..83: note = Xaa can be any naturally occurring amino acid
  VARIANT 85..89: note = Xaa can be any naturally occurring amino acid
  VARIANT 134..138: note = Xaa can be any naturally occurring amino acid
  DISULFID 84..139: note = Disulfide bond
GSHSMRYFFTSVSRPGRGEPRFIAVGYVDDTQFVRFDSDAASQRMEPRAPWIEQEGPEYWDGETRKVKAHSQTHRVDLXXXXXCXXXXXAGSHTVQRMYGCDVGSDWRFLRGYHQYAYDGKDYIALKEDLRSWXXXXXCHKWEAAHVAEQLRAYLEGTCVEWLRRYLENGKETLQRTDAPKTHMTHHAVSDHEATLRCWALSFYPAEITLTWQRDGEDQTQDTELVETRPAGDGTFQKWAAVVVPSGQEQRYTCHVQHEGLPKPLTLRWEP

SEQ ID NO: 85 - protein, 5 aa, synthetic construct
  REGION 1..5: note = Description of sequence: peptide for use with modified Class I HLA polypeptide of SEQ ID NO:84
GTLRG

SEQ ID NO: 86 - protein, 5 aa, synthetic construct
  REGION 1..5: note = Description of sequence: peptide for use with modified Class I HLA polypeptide of SEQ ID NO:84
YNQSE

SEQ ID NO: 87 - protein, 5 aa, synthetic construct
  REGION 1..5: note = Description of sequence: peptide for use with modified Class I HLA polypeptide of SEQ ID NO:84
TAADM

SEQ ID NO: 88 - protein, 5 aa, synthetic construct
  REGION 1..5: note = Description of sequence: peptide for use with modified Class I HLA polypeptide of SEQ ID NO:84
AQTTK

SEQ ID NO: 89 - protein, 33 aa, synthetic construct
  REGION 1..33: note = Description of sequence: leucine-zipper polypeptide
RMKQIEDKIEEILSKIYHIENEIARIKKLIGER

SEQ ID NO: 90 - protein, 32 aa, synthetic construct
  REGION 1..32: note = Description of sequence: leucine-zipper polypeptide
LSSIEKKQEEQTSWLIWISNELTLIRNELAQS

SEQ ID NO: 91 - protein, 31 aa, synthetic construct
  REGION 1..31: note = Description of sequence: leucine-zipper polypeptide
LSSIEKKLEEITSQLIQISNELTLIRNELAQ

SEQ ID NO: 92 - protein, 31 aa, synthetic construct
  REGION 1..31: note = Description of sequence: leucine-zipper polypeptide
LSSIEKKLEEITSQLIQIRNELTLIRNELAQ

SEQ ID NO: 93 - protein, 31 aa, synthetic construct
  REGION 1..31: note = Description of sequence: leucine-zipper polypeptide
LSSIEKKLEEITSQLQQIRNELTLIRNELAQ

SEQ ID NO: 94 - protein, 31 aa, synthetic construct
  REGION 1..31: note = Description of sequence: leucine-zipper polypeptide
LSSLEKKLEELTSQLIQLRNELTLLRNELAQ

SEQ ID NO: 95 - protein, 31 aa, synthetic construct
  REGION 1..31: note = Description of sequence: leucine-zipper polypeptide
ISSLEKKIEELTSQIQQLRNEITLLRNEIAQ

SEQ ID NO: 96 - protein, 47 aa, synthetic construct
  REGION 1..47: note = Description of sequence: leucine-zipper polypeptide
LEIEAAFLERENTALETRVAELRQRVQRLRNRVSQYRTRYGPLGGGK

SEQ ID NO: 97 - protein, 31 aa, synthetic construct
  REGION 1..31: note = Description of sequence: coiled-coil polypeptide
LKSVENRLAVVENQLKTVIEELKTVKDLLSN

SEQ ID NO: 98 - protein, 68 aa, synthetic construct
  REGION 1..68: note = Description of sequence: coiled-coil polypeptide
LKSVENRLAVVENQLKTVIEELKTVKDLLSNSEQIDNLARIEEKLKTIKAQLSEIASTLNMIREQLAQ

SEQ ID NO: 99 - protein, 31 aa, synthetic construct
  REGION 1..31: note = Description of sequence: coiled-coil polypeptide
VSRLEEKVKTLKSQVTELASTVSLLREQVAQ

SEQ ID NO: 100 - protein, 30 aa, synthetic construct
  REGION 1..30: note = Description of sequence: coiled-coil polypeptide
IQSEKKIEDISSLIGQIQSEITLIRNEIAQ

SEQ ID NO: 101 - protein, 31 aa, synthetic construct
  REGION 1..31: note = Description of sequence: coiled-coil polypeptide
LMSLEKKLEELTQTLMQLQNELSMLKNELAQ

SEQ ID NO: 102 - protein, 18 aa, synthetic construct
  REGION 1..18: note = Description of sequence: homodimerizing scaffold polypeptide capable of forming interchain disulifide bond
VDLEGSTSNGRQCAGIRL

SEQ ID NO: 103 - protein, 27 aa, synthetic construct
  REGION 1..27: note = Description of sequence: homodimerizing scaffold polypeptide capable of forming interchain disulifide bond
EDDVTTTEELAPALVPPPKGTCAGWMA

SEQ ID NO: 104 - protein, 27 aa, synthetic construct
  REGION 1..27: note = Description of sequence: homodimerizing scaffold polypeptide capable of forming interchain disulifide bond
GHDQETTTQGPGVLLPLPKGACTGQMA

SEQ ID NO: 105 - protein, 64 aa, synthetic construct
  REGION 1..64: note = Description of sequence: collagen peptide sequence
VTAFSNMDDMLQKAHLVIEGTFIYLRDSTEFFIRVRDGWKKLQLGELIPIPADSPPPPALSSNP

SEQ ID NO: 106 - protein, 208 aa, synthetic construct [sequence omitted]

SEQ ID NO: 107 - protein, 220 aa, synthetic construct
  REGION 1..220: note = Description of sequence: wild-type human CD28 polypeptide
MLRLLLALNLFPSIQVTGNKILVKQSPMLVAYDNAVNLSCKYSYNLFSREFRASLHKGLDSAVEVCVVYGNYSQQLQVYSKTGFNCDGKLGNESVTFYLQNLYVNQTDIYFCKIEVMYPPPYLDNEKSNGTIIHVKGKHLCPSPLFPGPSKPFWVLVVVGGVLACYSLLVTVAFIIFWVRSKRSRLLHSDYMNMTPRRPGPTRKHYQPYAPPRDFAAYRS

SEQ ID NO: 108 - protein, 123 aa, synthetic construct
  REGION 1..123: note = Description of sequence: wild-type human CD28 polypeptide
MLRLLLALNLFPSIQVTGNKILVKQSPMLVAYDNAVNLSWKHLCPSPLFPGPSKPFWVLVVVGGVLACYSLLVTVAFIIFWVRSKRSRLLHSDYMNMTPRRPGPTRKHYQPYAPPRDFAAYRS

SEQ ID NO: 109 - protein, 101 aa, synthetic construct
  REGION 1..101: note = Description of sequence: wild-type human CD28 polypeptide
MLRLLLALNLFPSIQVTGKHLCPSPLFPGPSKPFWVLVVVGGVLACYSLLVTVAFIIFWVRSKRSRLLHSDYMNMTPRRPGPTRKHYQPYAPPRDFAAYRS

SEQ ID NO: 110 - protein, 224 aa, synthetic construct
  REGION 1..224: note = Description of sequence: ectodomain of a wild-type human CD86 polypeptide
APLKIQAYFNETADLPCQFANSQNQSLSELVVFWQDQENLVLNEVYLGKEKFDSVHSKYMNRTSFDSDSWTLRLHNLQIKDKGLYQCIIHHKKPTGMIRIHQMNSELSVLANFSQPEIVPISNITENVYINLTCSSIHGYPEPKKMSVLLRTKNSTIEYDGIMQKSQDNVTELYDVSISLSVSFPDVTSNMTIFCILETDKTRLLSSPFSIELEDPQPPPDHIP

SEQ ID NO: 111 - protein, 110 aa, synthetic construct
  REGION 1..110: note = Description of sequence: IgV domain of a wild-type human CD86 polypeptide
APLKIQAYFNETADLPCQFANSQNQSLSELVVFWQDQENLVLNEVYLGKEKFDSVHSKYMNRTSFDSDSWTLRLHNLQIKDKGLYQCIIHHKKPTGMIRIHQMNSELSVL

SEQ ID NO: 112 - protein, 254 aa, synthetic construct
  REGION 1..254: note = Description of sequence: wild-type human 4-1BBL polypeptide
MEYASDASLDPEAPWPPAPRARACRVLPWALVAGLLLLLLLAAACAVFLACPWAVSGARASPGSAASPRLREGPELSPDDPAGLLDLRQGMFAQLVAQNVLLIDGPLSWYSDPGLAGVSLTGGLSYKEDTKELVVAKAGVYYVFFQLELRRVVAGEGSGSVSLALHLQPLRSAAGAAALALTVDLPPASSEARNSAFGFQGRLLHLSAGQRLGVHLHTEARARHAWQLTQGATVLGLFRVTPEIPAGLPSPRSE

SEQ ID NO: 113 - protein, 174 aa, synthetic construct
  REGION 1..174: note = Description of sequence: factor (TNF) homology domain (THD) of human 4-1BBL polypeptide
PAGLLDLRQGMFAQLVAQNVLLIDGPLSWYSDPGLAGVSLTGGLSYKEDTKELVVAKAGVYYVFFQLELRRVVAGEGSGSVSLALHLQPLRSAAGAAALALTVDLPPASSEARNSAFGFQGRLLHLSAGQRLGVHLHTEARARHAWQLTQGATVLGLFRVTPEIPAGLPSPRSE

SEQ ID NO: 114 - protein, 175 aa, synthetic construct
  REGION 1..175: note = Description of sequence: factor (TNF) homology domain (THD) of human 4-1BBL polypeptide
DPAGLLDLRQGMFAQLVAQNVLLIDGPLSWYSDPGLAGVSLTGGLSYKEDTKELVVAKAGVYYVFFQLELRRVVAGEGSGSVSLALHLQPLRSAAGAAALALTVDLPPASSEARNSAFGFQGRLLHLSAGQRLGVHLHTEARARHAWQLTQGATVLGLFRVTPEIPAGLPSPRSE

SEQ ID NO: 115 - protein, 167 aa, synthetic construct
  REGION 1..167: note = Description of sequence: factor (TNF) homology domain (THD) of human 4-1BBL polypeptide
DPAGLLDLRQGMFAQLVAQNVLLIDGPLSWYSDPGLAGVSLTGGLSYKEDTKELVVAKAGVYYVFFQLELRRVVAGEGSGSVSLALHLQPLRSAAGAAALALTVDLPPASSEARNSAFGFQGRLLHLSAGQRLGVHLHTEARARHAWQLTQGATVLGLFRVTPEIPA

SEQ ID NO: 116 - protein, 255 aa, synthetic construct
  REGION 1..255: note = Description of sequence: wild-type human 4-1BBL polypeptide
MGNSCYNIVATLLLVLNFERTRSLQDPCSNCPAGTFCDNNRNQICSPCPPNSFSSAGGQRTCDICRQCKGVFRTRKECSSTSNAECDCTPGFHCLGAGCSMCEQDCKQGQELTKKGCKDCCFGTFNDQKRGICRPWTNCSLDGKSVLVNGTKERDVVCGPSPADLSPGASSVTPPAPAREPGHSPQIISFFLALTSTALLFLLFFLTLRFSVVKRGRKKLLYIFKQPFMRPVQTTQEEDGCSCRFPEEEEGGCEL

SEQ ID NO: 117 - protein, 133 aa, synthetic construct [sequence omitted]

SEQ ID NO: 118 - protein, 251 aa, synthetic construct
  REGION 1..251: note = Description of sequence: human IL-2R-Alpha subunit polypeptide
ELCDDDPPEIPHATFKAMAYKEGTMLNCECKRGFRRIKSGSLYMLCTGNSSHSSWDNQCQCTSSATRNTTKQVTPQPEEQKERKTTEMQSPMQPVDQASLPGHCREPPPWENEATERIYHFVVGQMVYYQCVQGYRALHRGPAESVCKMTHGKTRWTQPQLICTGEMETSQFPGEEKPQASPEGRPESETSCLVTTTDFQIQTEMAATMETSIFTTEYQVAVAGCVFLLISVLLLSGLTWQRRQRKSRRTI

SEQ ID NO: 119 - protein, 524 aa, synthetic construct
  REGION 1..524: note = Description of sequence: human IL-2R-beta subunit polypeptide
VNGTSQFTCFYNSRANISCVWSQDGALQDTSCQVHAWPDRRRWNQTCELLPVSQASWACNLILGAPDSQKLTTVDIVTLRVLCREGVRWRVMAIQDFKPFENLRLMAPISLQVVHVETHRCNISWEISQASHYFERHLEFEARTLSPGHTWEEAPLLTLKQKQEWICLETLTPDTQYEFQVRVKPLQGEFTTWSPWSQPLAFRTKPAALGKDTIPWLGHLLVGLSGAFGFIILVYLLINCRNTGPWLKKVLKCNTPDPSKFFSQLSSEHGGDVQKWLSSPFPSSSFSPGGLAPEISPLEVLERDKVTQLLLQQDKVPEPASLSSNHSLTSCFTNQGYFFFHLPDALEIEACQVYFTYDPYSEEDPDEGVAGAPTGSSPQPLQPLSGEDDAYCTFPSRDDLLLFSPSLLGGPSPPSTAPGGSGAGEERMPPSLQERVPRDWDPQPLGPPTPGVPDLVDFQPPPELVLREAGEEVPDAGPREGVSFPWSRPPGQGEFRALNARLPLNTDAYLSLQELQGQDPTHLV

SEQ ID NO: 120 - protein, 347 aa, synthetic construct
  REGION 1..347: note = Description of sequence: human IL-2R-gamma subunit polypeptide
LNTTILTPNGNEDTTADFFLTTMPTDSLSVSTLPLPEVQCFVFNVEYMNCTWNSSSEPQPTNLTLHYWYKNSDNDKVQKCSHYLFSEEITSGCQLQKKEIHLYQTFVVQLQDPREPRRQATQMLKLQNLVIPWAPENLTLHKLSESQLELNWNNRFLNHCLEHLVQYRTDWDHSWTEQSVDYRHKFSLPSVDGQKRYTFRVRSRFNPLCGSAQHWSEWSHPIHWGSNTSKENPFLFALEAVVISVGSMGLIISLLCVYFWLERTMPRIPTLKNLEDLVTEYHGNFSAWSGVSKGLAESLQPDYSERLCLVSEIPPKGGALGEGPGASPCNQHSPYWAPPCYTLKPET

SEQ ID NO: 121 - protein, 50 aa, synthetic construct
  REGION 1..50: note = Description of sequence: linker polypeptide sequence
  REGION 1..50: note = GSGGS is repeated 1-10 times, 10x shown
GSGGSGSGGSGSGGSGSGGSGSGGSGSGGSGSGGSGSGGSGSGGSGSGGS

SEQ ID NO: 122 - protein, 40 aa, synthetic construct
  REGION 1..40: note = Description of sequence: linker polypeptide sequence
  REGION 1..40: note = GGGS is repeated 1-10 times, 10x shown
GGGSGGGSGGGSGGGSGGGSGGGSGGGSGGGSGGGSGGGS

SEQ ID NO: 123 - protein, 60 aa, synthetic construct
  REGION 1..60: note = Description of sequence: linker polypeptide sequence
  REGION 1..60: note = GGGS is repeated 1-15 times, 15x shown
GGSGGGSGGGSGGGSGGGSGGGSGGGSGGGSGGGSGGGSGGGSGGGSGGGSGGGSGGGSG

SEQ ID NO: 124 - protein, 75 aa, synthetic construct
  REGION 1..75: note = Description of sequence: linker polypeptide sequence
  REGION 1..75: note = GGSGG is repeated 1-15 times, 15x shown
GGSGGGGSGGGGSGGGGSGGGGSGGGGSGGGGSGGGGSGGGGSGGGGSGGGGSGGGGSGGGGSGGGGSGGGGSGG

SEQ ID NO: 125 - protein, 75 aa, synthetic construct
  REGION 1..75: note = Description of sequence: linker polypeptide sequence
  REGION 1..75: note = GSGSG is repeated 1-15 times, 15x shown
GSGSGGSGSGGSGSGGSGSGGSGSGGSGSGGSGSGGSGSGGSGSGGSGSGGSGSGGSGSGGSGSGGSGSGGSGSG

SEQ ID NO: 126 - protein, 75 aa, synthetic construct
  REGION 1..75: note = Description of sequence: linker polypeptide sequence
  REGION 1..75: note = GSGGG is repeated 1-15 times, 15x shown
GSGGGGSGGGGSGGGGSGGGGSGGGGSGGGGSGGGGSGGGGSGGGGSGGGGSGGGGSGGGGSGGGGSGGGGSGGG

SEQ ID NO: 127 - protein, 75 aa, synthetic construct
  REGION 1..75: note = Description of sequence: linker polypeptide sequence
  REGION 1..75: note = GGGSG is repeated 1-15 times, 15x shown
GGGSGGGGSGGGGSGGGGSGGGGSGGGGSGGGGSGGGGSGGGGSGGGGSGGGGSGGGGSGGGGSGGGGSGGGGSG

SEQ ID NO: 128 - protein, 75 aa, synthetic construct
  REGION 1..75: note = Description of sequence: linker polypeptide sequence
  REGION 1..75: note = GSSSG is repeated 1-15 times, 15x shown
GSSSGGSSSGGSSSGGSSSGGSSSGGSSSGGSSSGGSSSGGSSSGGSSSGGSSSGGSSSGGSSSGGSSSGGSSSG

SEQ ID NO: 129 - protein, 50 aa, synthetic construct
  REGION 1..50: note = Description of sequence: linker polypeptide sequence
  REGION 1..50: note = GSSSS is repeated 1-10 times, 10x shown
GSSSSGSSSSGSSSSGSSSSGSSSSGSSSSGSSSSGSSSSGSSSSGSSSS

SEQ ID NO: 130 - protein, 50 aa, synthetic construct
  REGION 1..50: note = Description of sequence: linker polypeptide sequence
  REGION 1..50: note = GGGGS is repeated 1-10 times, 10x shown
GGGGSGGGGSGGGGSGGGGSGGGGSGGGGSGGGGSGGGGSGGGGSGGGGS

SEQ ID NO: 131 - protein, 5 aa, synthetic construct
  REGION 1..5: note = Description of sequence: linker polypeptide sequence
  REGION 1..5: note = One amino acid may be a leucine, cysteine, methionine, or alanine
  VARIANT 1..5: note = G can also be S
GGGGG

SEQ ID NO: 132 - protein, 50 aa, synthetic construct
  REGION 1..50: note = Description of sequence: linker polypeptide sequence
  REGION 1..50: note = AAAGG is repeated 1-10 times, 10x shown
AAAGGAAAGGAAAGGAAAGGAAAGGAAAGGAAAGGAAAGGAAAGGAAAGG

SEQ ID NO: 133 - protein, 100 aa, synthetic construct
  REGION 1..100: note = Description of sequence: linker polypeptide sequence
  REGION 1..100: note = EAAAK is repeated 1-20 times, 20x shown
EAAAKEAAAKEAAAKEAAAKEAAAKEAAAKEAAAKEAAAKEAAAKEAAAKEAAAKEAAAKEAAAKEAAAKEAAAKEAAAKEAAAKEAAAKEAAAKEAAAK

SEQ ID NO: 134 - protein, 102 aa, synthetic construct
  REGION 1..102: note = Description of sequence: linker polypeptide sequence
  REGION 2..101: note = EAAAK is repeated 1-20 times, 20x shown
AEAAAKEAAAKEAAAKEAAAKEAAAKEAAAKEAAAKEAAAKEAAAKEAAAKEAAAKEAAAKEAAAKEAAAKEAAAKEAAAKEAAAKEAAAKEAAAKEAAAKA

SEQ ID NO: 135 - protein, 206 aa, synthetic construct
  REGION 1..206: note = Description of sequence: linker polypeptide sequence
  REGION 2..101: note = EAAAK is repeated 1-20 times, 20x shown
  REGION 106..205: note = EAAAK is repeated 1-20 times, 20x shown
AEAAAKEAAAKEAAAKEAAAKEAAAKEAAAKEAAAKEAAAKEAAAKEAAAKEAAAKEAAAKEAAAKEAAAKEAAAKEAAAKEAAAKEAAAKEAAAKEAAAKALEAEAAAKEAAAKEAAAKEAAAKEAAAKEAAAKEAAAKEAAAKEAAAKEAAAKEAAAKEAAAKEAAAKEAAAKEAAAKEAAAKEAAAKEAAAKEAAAKEAAAKA

SEQ ID NO: 136 - protein, 5 aa, synthetic construct
  REGION 1..5: note = Description of sequence: linker polypeptide sequence
EAAAK

SEQ ID NO: 137 - protein, 10 aa, synthetic construct
  REGION 1..10: note = Description of sequence: linker polypeptide sequence
EAAAKEAAAK

SEQ ID NO: 138 - protein, 15 aa, synthetic construct
  REGION 1..15: note = Description of sequence: linker polypeptide sequence
EAAAKEAAAKEAAAK

SEQ ID NO: 139 - protein, 46 aa, synthetic construct
  REGION 1..46: note = Description of sequence: linker polypeptide sequence
AEAAAKEAAAKEAAAKEAAAKALEAEAAAKEAAAKEAAAKEAAAKA

SEQ ID NO: 140 - protein, 12 aa, synthetic construct
  REGION 1..12: note = Description of sequence: linker polypeptide sequence
AEAAAKEAAAKA

SEQ ID NO: 141 - protein, 5 aa, synthetic construct
  REGION 1..5: note = Description of sequence: linker polypeptide sequence
PAPAP

SEQ ID NO: 142 - protein, 8 aa, synthetic construct
  REGION 1..8: note = Description of sequence: linker polypeptide sequence
APAPAPAP

SEQ ID NO: 143 - protein, 12 aa, synthetic construct
  REGION 1..12: note = Description of sequence: linker polypeptide sequence
APAPAPAPAPAP

SEQ ID NO: 144 - protein, 16 aa, synthetic construct
  REGION 1..16: note = Description of sequence: linker polypeptide sequence
APAPAPAPAPAPAPAP

SEQ ID NO: 145 - protein, 20 aa, synthetic construct
  REGION 1..20: note = Description of sequence: linker polypeptide sequence
APAPAPAPAPAPAPAPAPAP

SEQ ID NO: 146 - protein, 4 aa, synthetic construct
  REGION 1..4: note = Description of sequence: linker polypeptide sequence
KPKP

SEQ ID NO: 147 - protein, 8 aa, synthetic construct
  REGION 1..8: note = Description of sequence: linker polypeptide sequence
KPKPKPKP

SEQ ID NO: 148 - protein, 12 aa, synthetic construct
  REGION 1..12: note = Description of sequence: linker polypeptide sequence
KPKPKPKPKPKP

SEQ ID NO: 149 - protein, 16 aa, synthetic construct
  REGION 1..16: note = Description of sequence: linker polypeptide sequence
KPKPKPKPKPKPKPKP

SEQ ID NO: 150 - protein, 20 aa, synthetic construct
  REGION 1..20: note = Description of sequence: linker polypeptide sequence
KPKPKPKPKPKPKPKPKPKP

SEQ ID NO: 151 - protein, 4 aa, synthetic construct
  REGION 1..4: note = Description of sequence: linker polypeptide sequence
EPEP

SEQ ID NO: 152 - protein, 8 aa, synthetic construct
  REGION 1..8: note = Description of sequence: linker polypeptide sequence
EPEPEPEP

SEQ ID NO: 153 - protein, 12 aa, synthetic construct
  REGION 1..12: note = Description of sequence: linker polypeptide sequence
EPEPEPEPEPEP

SEQ ID NO: 154 - protein, 16 aa, synthetic construct
  REGION 1..16: note = Description of sequence: linker polypeptide sequence
EPEPEPEPEPEPEPEP

SEQ ID NO: 155 - protein, 20 aa, synthetic construct
  REGION 1..20: note = Description of sequence: linker polypeptide sequence
EPEPEPEPEPEPEPEPEPEP

SEQ ID NO: 156 - protein, 55 aa, synthetic construct
  REGION 1..55: note = Description of sequence: cysteine-containing linker polypeptide sequence
  REGION 6..55: note = GGGGS is repeated 1-10 times, 10x shown
GCGGSGGGGSGGGGSGGGGSGGGGSGGGGSGGGGSGGGGSGGGGSGGGGSGGGGS

SEQ ID NO: 157 - protein, 15 aa, synthetic construct
  REGION 1..15: note = Description of sequence: cysteine-containing linker polypeptide sequence
GCGASGGGGSGGGGS

SEQ ID NO: 158 - protein, 20 aa, synthetic construct
  REGION 1..20: note = Description of sequence: cysteine-containing linker polypeptide sequence
GCGGSGGGGSGGGGSGGGGS

SEQ ID NO: 159 - protein, 15 aa, synthetic construct
  REGION 1..15: note = Description of sequence: cysteine-containing linker polypeptide sequence
GCGGSGGGGSGGGGS

SEQ ID NO: 160 - protein, 9 aa, synthetic construct
  REGION 1..9: note = Description of sequence: hemaagglutinin tag polypeptide sequence
YPYDVPDYA

SEQ ID NO: 161 - protein, 10 aa, synthetic construct
  REGION 1..10: note = Description of sequence: c-myc tag polypeptide sequence
EQKLISEEDL

SEQ ID NO: 162 - protein, 5 aa, synthetic construct
  REGION 1..5: note = Description of sequence: His Tag peptide
HHHHH

SEQ ID NO: 163 - protein, 6 aa, synthetic construct
  REGION 1..6: note = Description of sequence: His Tag peptide
HHHHHH

SEQ ID NO: 164 - protein, 8 aa, synthetic construct
  REGION 1..8: note = Description of sequence: FLAG Tag peptide
DYKDDDDK

SEQ ID NO: 165 - protein, 8 aa, synthetic construct
  REGION 1..8: note = Description of sequence: StrepTag peptide
WSHPQFEK

SEQ ID NO: 166 - protein, 5 aa, synthetic construct
  REGION 1..5: note = Description of sequence: GST Tag peptide
RYIRS

SEQ ID NO: 167 - protein, 4 aa, synthetic construct
  REGION 1..4: note = Description of sequence: Tag peptide
FHHT

SEQ ID NO: 168 - protein, 17 aa, synthetic construct
  REGION 1..17: note = Description of sequence: "SH2 domain C-end RNA tag sequence"
WEAAAREACCRECCARA

SEQ ID NO: 169 - protein, 586 aa, Homo sapiens
  REGION 1..586: note = Description of sequence: human mesothelin sequence
LAGETGQEAAPLDGVLANPPNISSLSPRQLLGFPCAEVSGLSTERVRELAVALAQKNVKLSTEQLRCLAHRLSEPPEDLDALPLDLLLFLNPDAFSGPQACTRFFSRITKANVDLLPRGAPERQRLLPAALACWGVRGSLLSEADVRALGGLACDLPGRFVAESAEVLLPRLVSCPGPLDQDQQEAARAALQGGGPPYGPPSTWSVSTMDALRGLLPVLGQPIIRSIPQGIVAAWRQRSSRDPSWRQPERTILRPRFRREVEKTACPSGKKAREIDESLIFYKKWELEACVDAALLATQMDRVNAIPFTYEQLDVLKHKLDELYPQGYPESVIQHLGYLFLKMSPEDIRKWNVTSLETLKALLEVNKGHEMSPQVATLIDRFVKGRGQLDKDTLDTLTAFYPGYLCSLSPEELSSVPPSSIWAVRPQDLDTCDPRQLDVLYPKARLAFQNMNGSEYFVKIQSFLGGAPTEDLKALSQQNVSMDLATFMKLRTDAVLPLTVAEVQKLLGPHVEGLKAEERHRPVRDWILRQRQDDLDTLGLGLQGGIPNGYLVLDLSMQEALSGTPCLLGPGPVLTVLALLLASTLA

SEQ ID NO: 170 - protein, 10 aa, synthetic construct
  REGION 1..10: note = Description of sequence: mesothelin peptide
KLLGPHVEGL

SEQ ID NO: 171 - protein, 10 aa, synthetic construct
  REGION 1..10: note = Description of sequence: mesothelin peptide
AFYPGYLCSL

SEQ ID NO: 172 - protein, 9 aa, synthetic construct
  REGION 1..9: note = Description of sequence: mesothelin peptide
VLPLTVAEV

SEQ ID NO: 173 - protein, 9 aa, synthetic construct
  REGION 1..9: note = Description of sequence: mesothelin peptide
ELAVALAQK

SEQ ID NO: 174 - protein, 9 aa, synthetic construct
  REGION 1..9: note = Description of sequence: mesothelin peptide
ALQGGGPPY

SEQ ID NO: 175 - protein, 9 aa, synthetic construct
  REGION 1..9: note = Description of sequence: mesothelin peptide
FYPGYLCSL

SEQ ID NO: 176 - protein, 9 aa, synthetic construct
  REGION 1..9: note = Description of sequence: mesothelin peptide
LYPKARLAF

SEQ ID NO: 177 - protein, 15 aa, synthetic construct
  REGION 1..15: note = Description of sequence: mesothelin peptide
LLFLLFSLGWVGPSR

SEQ ID NO: 178 - protein, 15 aa, synthetic construct
  REGION 1..15: note = Description of sequence: mesothelin peptide
VNKGHEMSPQAPRRP

SEQ ID NO: 179 - protein, 15 aa, synthetic construct
  REGION 1..15: note = Description of sequence: mesothelin peptide
FMKLRTDAVLPLTVA

SEQ ID NO: 180 - protein, 10 aa, synthetic construct
  REGION 1..10: note = Description of sequence: mesothelin peptide
DAALLATQMD

SEQ ID NO: 181 - protein, 1055 aa, Homo sapiens
  REGION 1..1055: note = Description of sequence: human HER2 sequence
MELAALCRWGLLLALLPPGAASTQVCTGTDMKLRLPASPETHLDMLRHLYQGCQVVQGNLELTYLPTNASLSFLQDIQEVQGYVLIAHNQVRQVPLQRLRIVRGTQLFEDNYALAVLDNGDPLNNTTPVTGASPGGLRELQLRSLTEILKGGVLIQRNPQLCYQDTILWKDIFHKNNQLALTLIDTNRSRACHPCSPMCKGSRCWGESSEDCQSLTRTVCAGGCARCKGPLPTDCCHEQCAAGCTGPKHSDCLACLHFNHSGICELHCPALVTYNTDTFESMPNPEGRYTFGASCVTACPYNYLSTDVGSCTLVCPLHNQEVTAEDGTQRCEKCSKPCARVCYGLGMEHLREVRAVTSANIQEFAGCKKIFGSLAFLPESFDGDPASNTAPLQPEQLQVFETLEEITGYLYISAWPDSLPDLSVFQNLQVIRGRILHNGAYSLTLQGLGISWLGLRSLRELGSGLALIHHNTHLCFVHTVPWDQLFRNPHQALLHTANRPEDECVGEGLACHQLCARGHCWGPGPTQCVNCSQFLRGQECVEECRVLQGLPREYVNARHCLPCHPECQPQNGSVTCFGPEADQCVACAHYKDPPFCVARCPSGVKPDLSYMPIWKFPDEEGACQPCPINCTHSCVDLDDKGCPAEQRASPLTSIISAVVGILLVVVLGVVFGILIKRRQQKIRKYTMRRLLQETELVEPLTPSGAMPNQAQMRILKETELRKVKVLGSGAFGTVYKGIWIPDGENVKIPVAIKVLRENTSPKANKEILDEAYVMAGVGSPYVSRLLGICLTSTVQLVTQLMPYGCLLDHVRENRGRLGSQDLLNWCMQIAKGMSYLEDVRLVHRDLAARNVLVKSPNHVKITDFGLARLLDIDETEYHADGGKVPIKWMALESILRRRFTHQSDVWSYGVTVWELMTFGAKPYDGIPAREIPDLLEKGERLPQPPICTIDVYMIMVKCWMIDSECRPRFRELVSEFSRMARDPQRFVVIQNEDLGPASPLDSTFYRSLLEDDDMGDLVDAEEYLVPQQGFFCPDPAPGAGGMVHHRHRSSSTRNM

SEQ ID NO: 182 - protein, 184 aa, Homo sapiens [sequence omitted]

SEQ ID NO: 183 - protein, 501 aa, synthetic construct
  REGION 1..501: note = Description of sequence: WT-1 polypeptide sequence
MDFLLLQDPASTCVPEPASQHTLRSGPGCLQQPEQQGVRDPGGIWAKLGAAEASAERLQGRRSRGASGSEPQQMGSDVRDLNALLPAVPSLGGGGGCALPVSGAAQWAPVLDFAPPGASAYGSLGGPAPPPAPPPPPPPPPHSFIKQEPSWGGAEPHEEQCLSAFTVHFSGQFTGTAGACRYGPFGPPPPSQASSGQARMFPNAPYLPSCLESQPAIRNQGYSTVTFDGTPSYGHTPSHHAAQFPNHSFKHEDPMGQQGSLGEQQYSVPPPVYGCHTPTDSCTGSQALLLRTPYSSDNLYQMTSQLECMTWNQMNLGATLKGHSTGYESDNHTTPILCGAQYRIHTHGVFRGIQDVRRVPGVAPTLVRSASETSEKRPFMCAYPGCNKRYFKLSHLQMHSRKHTGEKPYQCDFKDCERRFSRSDQLKRHQRRHTGVKPFQCKTCQRKFSRSDHLKTHTRTHTGEKPFSCRWPSCQKKFARSDELVRHHNMHQRNMTKLQLA

SEQ ID NO: 184 - protein, 9 aa, synthetic construct
  REGION 1..9: note = Description of sequence: WT-1 peptide
RMFPNAPYL

SEQ ID NO: 185 - protein, 8 aa, synthetic construct
  REGION 1..8: note = Description of sequence: WT-1 peptide
CMTWNQMN

SEQ ID NO: 186 - protein, 8 aa, synthetic construct
  REGION 1..8: note = Description of sequence: WT-1 peptide
CMTWNQMN

SEQ ID NO: 187 - protein, 9 aa, synthetic construct
  REGION 1..9: note = Description of sequence: WT-1 peptide
CMTWNQMNL

SEQ ID NO: 188 - protein, 14 aa, synthetic construct
  REGION 1..14: note = Description of sequence: WT-1 peptide
NQMNLGATLKGVAA

SEQ ID NO: 189 - protein, 15 aa, synthetic construct
  REGION 1..15: note = Description of sequence: WT-1 peptide
CMTWNYMNLGATLKG

SEQ ID NO: 190 - protein, 15 aa, synthetic construct
  REGION 1..15: note = Description of sequence: WT-1 peptide
WNYMNLGATLKGVAA

SEQ ID NO: 191 - protein, 15 aa, synthetic construct
  REGION 1..15: note = Description of sequence: WT-1 peptide
MTWNQMNLGATLKGV

SEQ ID NO: 192 - protein, 15 aa, synthetic construct
  REGION 1..15: note = Description of sequence: WT-1 peptide
TWNQMNLGATLKGVA

SEQ ID NO: 193 - protein, 15 aa, synthetic construct
  REGION 1..15: note = Description of sequence: WT-1 peptide
CMTWNLMNLGATLKG

SEQ ID NO: 194 - protein, 15 aa, synthetic construct
  REGION 1..15: note = Description of sequence: WT-1 peptide
MTWNLMNLGATLKGV

SEQ ID NO: 195 - protein, 13 aa, synthetic construct
  REGION 1..13: note = Description of sequence: WT-1 peptide
TWNLMNLGATLKG

SEQ ID NO: 196 - protein, 15 aa, synthetic construct
  REGION 1..15: note = Description of sequence: WT-1 peptide
WNLMNLGATLKGVAA

SEQ ID NO: 197 - protein, 8 aa, synthetic construct
  REGION 1..8: note = Description of sequence: WT-1 peptide
MNLGATLK

SEQ ID NO: 198 - protein, 14 aa, synthetic construct
  REGION 1..14: note = Description of sequence: WT-1 peptide
TWNYMNLGATLKGV

SEQ ID NO: 199 - protein, 15 aa, synthetic construct
  REGION 1..15: note = Description of sequence: WT-1 peptide
TWNYMNLGATLKGVA

SEQ ID NO: 200 - protein, 17 aa, synthetic construct
  REGION 1..17: note = Description of sequence: WT-1 peptide
CMTWNQMNLGATLKGVA

SEQ ID NO: 201 - protein, 17 aa, synthetic construct
  REGION 1..17: note = Description of sequence: WT-1 peptide
CMTWNLMNLGATLKGVA

SEQ ID NO: 202 - protein, 17 aa, synthetic construct
  REGION 1..17: note = Description of sequence: WT-1 peptide
CMTWNYMNLGATLKGVA

SEQ ID NO: 203 - protein, 9 aa, synthetic construct
  REGION 1..9: note = Description of sequence: WT-1 peptide
GYLRNPTAC

SEQ ID NO: 204 - protein, 9 aa, synthetic construct
  REGION 1..9: note = Description of sequence: WT-1 peptide
GALRNPTAL

SEQ ID NO: 205 - protein, 9 aa, synthetic construct
  REGION 1..9: note = Description of sequence: WT-1 peptide
YALRNPTAC

SEQ ID NO: 206 - protein, 9 aa, synthetic construct
  REGION 1..9: note = Description of sequence: WT-1 peptide
GLLRNPTAC

SEQ ID NO: 207 - protein, 9 aa, synthetic construct
  REGION 1..9: note = Description of sequence: WT-1 peptide
RYRPHPGAL

SEQ ID NO: 208 - protein, 9 aa, synthetic construct
  REGION 1..9: note = Description of sequence: WT-1 peptide
YQRPHPGAL

SEQ ID NO: 209 - protein, 9 aa, synthetic construct
  REGION 1..9: note = Description of sequence: WT-1 peptide
RLRPHPGAL

SEQ ID NO: 210 - protein, 9 aa, synthetic construct
  REGION 1..9: note = Description of sequence: WT-1 peptide
RIRPHPGAL

SEQ ID NO: 211 - protein, 15 aa, synthetic construct
  REGION 1..15: note = Description of sequence: WT-1 peptide
QFPNHSFKHEDPMGQ

SEQ ID NO: 212 - protein, 9 aa, synthetic construct
  REGION 1..9: note = Description of sequence: WT-1 peptide
HSFKHEDPY

SEQ ID NO: 213 - protein, 13 aa, synthetic construct
  REGION 1..13: note = Description of sequence: WT-1 peptide
QFPNHSFKHEDPM

SEQ ID NO: 214 - protein, 13 aa, synthetic construct
  REGION 1..13: note = Description of sequence: WT-1 peptide
QFPNHSFKHEDPY

SEQ ID NO: 215 - protein, 13 aa, synthetic construct
  REGION 1..13: note = Description of sequence: WT-1 peptide
KRPFMCAYPGCNK

SEQ ID NO: 216 - protein, 13 aa, synthetic construct
  REGION 1..13: note = Description of sequence: WT-1 peptide
KRPFMCAYPGCYK

SEQ ID NO: 217 - protein, 9 aa, synthetic construct
  REGION 1..9: note = Description of sequence: WT-1 peptide
FMCAYPGCY

SEQ ID NO: 218 - protein, 9 aa, synthetic construct
  REGION 1..9: note = Description of sequence: WT-1 peptide
FMCAYPGCK

SEQ ID NO: 219 - protein, 15 aa, synthetic construct
  REGION 1..15: note = Description of sequence: WT-1 peptide
KRPFMCAYPGCNKRY

SEQ ID NO: 220 - protein, 15 aa, synthetic construct
  REGION 1..15: note = Description of sequence: WT-1 peptide
SEKRPFMCAYPGCNK

SEQ ID NO: 221 - protein, 15 aa, synthetic construct
  REGION 1..15: note = Description of sequence: WT-1 peptide
KRPFMCAYPGCYKRY

SEQ ID NO: 222 - protein, 9 aa, synthetic construct
  REGION 1..9: note = Description of sequence: WT-1 peptide
NLMNLGATL

SEQ ID NO: 223 - protein, 9 aa, synthetic construct
  REGION 1..9: note = Description of sequence: WT-1 peptide
NYMNLGATL

SEQ ID NO: 224 - protein, 9 aa, synthetic construct
  REGION 1..9: note = Description of sequence: HPV polypeptide
KLPQLCTEL

SEQ ID NO: 225 - protein, 9 aa, synthetic construct
  REGION 1..9: note = Description of sequence: HPV polypeptide
LQTTIHDII

SEQ ID NO: 226 - protein, 9 aa, synthetic construct
  REGION 1..9: note = Description of sequence: HPV polypeptide
VYDFAFRDL

SEQ ID NO: 227 - protein, 9 aa, synthetic construct
  REGION 1..9: note = Description of sequence: HPV polypeptide
FAFRDLCIV

SEQ ID NO: 228 - protein, 9 aa, synthetic construct
  REGION 1..9: note = Description of sequence: HPV polypeptide
KFYSKISEY

SEQ ID NO: 229 - protein, 9 aa, synthetic construct
  REGION 1..9: note = Description of sequence: HPV polypeptide
ISEYRHYCY

SEQ ID NO: 230 - protein, 9 aa, synthetic construct
  REGION 1..9: note = Description of sequence: HPV polypeptide
TLHEYMLDL

SEQ ID NO: 231 - protein, 9 aa, synthetic construct
  REGION 1..9: note = Description of sequence: HPV polypeptide
YMLDLQPET

SEQ ID NO: 232 - protein, 9 aa, synthetic construct
  REGION 1..9: note = Description of sequence: HPV polypeptide
QAEPDRAHY

SEQ ID NO: 233 - protein, 9 aa, synthetic construct
  REGION 1..9: note = Description of sequence: HPV polypeptide
RAHYNIVTF

SEQ ID NO: 234 - protein, 9 aa, synthetic construct
  REGION 1..9: note = Description of sequence: HPV polypeptide
CDSTLRLCV

SEQ ID NO: 235 - protein, 10 aa, synthetic construct
  REGION 1..10: note = Description of sequence: HPV polypeptide
LCVQSTHVDI

SEQ ID NO: 236 - protein, 9 aa, synthetic construct
  REGION 1..9: note = Description of sequence: HPV polypeptide
LLMGTLGIV

SEQ ID NO: 237 - protein, 8 aa, synthetic construct
  REGION 1..8: note = Description of sequence: HPV polypeptide
TLGIVCPI

SEQ ID NO: 238 - protein, 12 aa, synthetic construct
  REGION 1..12: note = Description of sequence: HPV polypeptide
LLMGTLGIVCPI

SEQ ID NO: 239 - protein, 261 aa, Homo sapiens
  REGION 1..261: note = Description of sequence: claudin-18 isoform 2 sequence
MAVTACQGLGFVVSLIGIAGIIAATCMDQWSTQDLYNNPVTAVFNYQGLWRSCVRESSGFTECRGYFTLLGLPAMLQAVRALMIVGIVLGAIGLLVSIFALKCIRIGSMEDSAKANMTLTSGIMFIVSGLCAIAGVSVFANMLVTNFWMSTANMYTGMGGMVQTVQTRYTFGAALFVGWVAGGLTLIGGVMMCIACRGLAPEETNYKAVSYHASGHSVAYKPGGFKASTGFGSNTKNKKIYDGGARTEDEVQSYPSKHDYV

SEQ ID NO: 240 - protein, 15 aa, synthetic construct
  REGION 1..15: note = Description of sequence: claudin polypeptide
TEDEVQSYPSKHDYV

SEQ ID NO: 241 - protein, 12 aa, synthetic construct
  REGION 1..12: note = Description of sequence: claudin polypeptide
EVQSYPSKHDYV

SEQ ID NO: 242 - protein, 293 aa, Homo sapiens
  REGION 1..293: note = Description of sequence: TROP-2 amino acid sequence
QDNCTCPTNKMTVCSPDGPGGRCQCRALGSGMAVDCSTLTSKCLLLKARMSAPKNARTLVRPSEHALVDNDGLYDPDCDPEGRFKARQCNQTSVCWCVNSVGVRRTDKGDLSLRCDELVRTHHILIDLRHRPTAGAFNHSDLDAELRRLFRERYRLHPKFVAAVHYEQPTIQIELRQNTSQKAAGDVDIGDAAYYFERDIKGESLFQGRGGLDLRVRGEPLQVERTLIYYLDEIPPKFSMKRLTAGLIAVIVVVVVALVAGMAVLVITNRRKSGKYKKVEIKELGELRKEPSL

SEQ ID NO: 243 - protein, 214 aa, synthetic construct
  REGION 1..214: note = Description of sequence: anti-Her2 light chain sequence
DIQMTQSPSSLSASVGDRVTITCRASQDVNTAVAWYQQKPGKAPKLLIYSASFLYSGVPSRFSGSRSGTDFTLTISSLQPEDFATYYCQQHYTTPPTFGQGTKVEIKRTVAAPSVFIFPPSDEQLKSGTASVVCLLNNFYPREAKVQWKVDNALQSGNSQESVTEQDSKDSTYSLSSTLTLSKADYEKHKVYACEVTHQGLSSPVTKSFNRGEC

SEQ ID NO: 244 - protein, 450 aa, synthetic construct
  REGION 1..450: note = Description of sequence: anti-Her2 heavy chain sequence
EVQLVESGGGLVQPGGSLRLSCAASGFNIKDTYIHWVRQAPGKGLEWVARIYPTNGYTRYADSVKGRFTISADTSKNTAYLQMNSLRAEDTAVYYCSRWGGDGFYAMDYWGQGTLVTVSSASTKGPSVFPLAPSSKSTSGGTAALGCLVKDYFPEPVTVSWNSGALTSGVHTFPAVLQSSGLYSLSSVVTVPSSSLGTQTYICNVNHKPSNTKVDKKVEPKSCDKTHTCPPCPAPELLGGPSVFLFPPKPKDTLMISRTPEVTCVVVDVSHEDPEVKFNWYVDGVEVHNAKTKPREEQYNSTYRVVSVLTVLHQDWLNGKEYKCKVSNKALPAPIEKTISKAKGQPREPQVYTLPPSREEMTKNQVSLTCLVKGFYPSDIAVEWESNGQPENNYKTTPPVLDSDGSFFLYSKLTVDKSRWQQGNVFSCSVMHEALHNHYTQKSLSLSPGK

SEQ ID NO: 245 - protein, 107 aa, synthetic construct [sequence omitted]

SEQ ID NO: 246 - protein, 120 aa, synthetic construct [sequence omitted]

SEQ ID NO: 247 - protein, 10 aa, synthetic construct
  REGION 1..10: note = Description of sequence: anti-Her2 VL CDR1 sequence
RASQDVNTAV

SEQ ID NO: 248 - protein, 6 aa, synthetic construct
  REGION 1..6: note = Description of sequence: anti-Her2 VL CDR2 sequence
SASFLY

SEQ ID NO: 249 - protein, 8 aa, synthetic construct
  REGION 1..8: note = Description of sequence: anti-Her2 VL CDR3 sequence
QQHYTTPP

SEQ ID NO: 250 - protein, 8 aa, synthetic construct
  REGION 1..8: note = Description of sequence: anti-Her2 VH CDR1 sequence
GFNIKDTY

SEQ ID NO: 251 - protein, 7 aa, synthetic construct
  REGION 1..7: note = Description of sequence: anti-Her2 VH CDR2 sequence
GFNIKDT

SEQ ID NO: 252 - protein, 7 aa, synthetic construct
  REGION 1..7: note = Description of sequence: anti-Her2 VH CDR3 sequence
GFNIKDT

SEQ ID NO: 253 - protein, 242 aa, synthetic construct
  REGION 1..242: note = Description of sequence: anti-Her2 scFv
EVQLVESGGGLVQPGGSLRLSCAASGFNIKDTYIHWVRQAPGKGLEWVARIYPTNGYTRYADSVKGRFTISADTSKNTAYLQMNSLRAEDTAVYYCSRWGGDGFYAMDYWGQGTLVTVSSGGGGSGGGGSGGGGSDIQMTQSPSSLSASVGDRVTITCRASQDVNTAVAWYQQKPGKAPKLLIYSASFLYSGVPSRFSGSRSGTDFTLTISSLQPEDFATYYCQQHYTTPPTFGQGTKVEIK

SEQ ID NO: 254 - protein, 214 aa, synthetic construct
  REGION 1..214: note = Description of sequence: anti-Her2 antibody VL sequence
DIQMTQSPSSLSASVGDRVTITCKASQDVSIGVAWYQQKPGKAPKLLIYSASYRYTGVPSRFSGSGSGTDFTLTISSLQPEDFATYYCQQYYIYPYTFGQGTKVEIKRTVAAPSVFIFPPSDEQLKSGTASVVCLLNNFYPREAKVQWKVDNALQSGNSQESVTEQDSKDSTYSLSSTLTLSKADYEKHKVYACEVTHQGLSSPVTKSFNRGEC

SEQ ID NO: 255 - protein, 448 aa, synthetic construct
  REGION 1..448: note = Description of sequence: anti-Her2 antibody VH sequence
EVQLVESGGGLVQPGGSLRLSCAASGFTFTDYTMDWVRQAPGKGLEWVADVNPNSGGSIYNQRFKGRFTLSVDRSKNTLYLQMNSLRAEDTAVYYCARNLGPSFYFDYWGQGTLVTVSSASTKGPSVFPLAPSSKSTSGGTAALGCLVKDYFPEPVTVSWNSGALTSGVHTFPAVLQSSGLYSLSSVVTVPSSSLGTQTYICNVNHKPSNTKVDKKVEPKSCDKTHTCPPCPAPELLGGPSVFLFPPKPKDTLMISRTPEVTCVVVDVSHEDPEVKFNWYVDGVEVHNAKTKPREEQYNSTYRVVSVLTVLHQDWLNGKEYKCKVSNKALPAPIEKTISKAKGQPREPQVYTLPPSREEMTKNQVSLTCLVKGFYPSDIAVEWESNGQPENNYKTTPPVLDSDGSFFLYSKLTVDKSRWQQGNVFSCSVMHEALHNHYTQKSLSLSPG

SEQ ID NO: 256 - protein, 107 aa, synthetic construct [sequence omitted]

SEQ ID NO: 257 - protein, 119 aa, synthetic construct [sequence omitted]

SEQ ID NO: 258 - protein, 11 aa, synthetic construct
  REGION 1..11: note = Description of sequence: anti-Her2 VL CDR1 sequence
KASQDVSIGVA

SEQ ID NO: 259 - protein, 6 aa, synthetic construct
  REGION 1..6: note = Description of sequence: anti-Her2 VL CDR2 sequence
SASYRY

SEQ ID NO: 260 - protein, 8 aa, synthetic construct
  REGION 1..8: note = Description of sequence: anti-Her2 VL CDR3 sequence
QQYYIYPY

SEQ ID NO: 261 - protein, 10 aa, synthetic construct
  REGION 1..10: note = Description of sequence: anti-Her2 VH CDR1 sequence
GFTFTDYTMD

SEQ ID NO: 262 - protein, 18 aa, synthetic construct
  REGION 1..18: note = Description of sequence: anti-Her2 VH CDR2 sequence
ADVNPNSGGSIYNQRFKG

SEQ ID NO: 263 - protein, 12 aa, synthetic construct
  REGION 1..12: note = Description of sequence: anti-Her2 VH CDR3 sequence
ARNLGPSFYFDY

SEQ ID NO: 264 - protein, 15 aa, synthetic construct
  REGION 1..15: note = Description of sequence: anti-CD19 VL CDR1 sequence
KASQSVDYDGDSYLN

SEQ ID NO: 265 - protein, 7 aa, synthetic construct
  REGION 1..7: note = Description of sequence: anti-CD19 VL CDR2 sequence
DASNLVS

SEQ ID NO: 266 - protein, 9 aa, synthetic construct
  REGION 1..9: note = Description of sequence: anti-CD19 VL CDR3 sequence
QQSTEDPWT

SEQ ID NO: 267 - protein, 5 aa, synthetic construct
  REGION 1..5: note = Description of sequence: anti-CD19 VH CDR1 sequence
SYWMN

SEQ ID NO: 268 - protein, 17 aa, synthetic construct
  REGION 1..17: note = Description of sequence: anti-CD19 VH CDR2 sequence
QIWPGDGDTNYNGKFKG

SEQ ID NO: 269 - protein, 15 aa, synthetic construct
  REGION 1..15: note = Description of sequence: anti-CD19 VH CDR3 sequence
RETTTVGRYYYAMDY

SEQ ID NO: 270 - protein, 249 aa, synthetic construct
  REGION 1..249: note = Description of sequence: anti-CD19 scFv
DIQLTQSPASLAVSLGQRATISCKASQSVDYDGDSYLNWYQQIPGQPPKLLIYDASNLVSGIPPRFSGSGSGTDFTLNIHPVEKVDAATYHCQQSTEDPWTFGGGTKLEIKGGGGSGGGGSGGGGSQVQLQQSGAELVRPGSSVKISCKASGYAFSSYWMNWVKQRPGQGLEWIGQIWPGDGDTNYNGKFKGKATLTADESSSTAYMQLSSLASEDSAVYFCARRETTTVGRYYYAMDYWGQGTTVTVS

SEQ ID NO: 271 - protein, 217 aa, synthetic construct
  REGION 1..217: note = Description of sequence: anti-mesothelin light chain sequence
DIALTQPASVSGSPGQSITISCTGTSSDIGGYNSVSWYQQHPGKAPKLMIYGVNNRPSGVSNRFSGSKSGNTASLTISGLQAEDEADYYCSSYDIESATPVFGGGTKLTVLGQPKAAPSVTLFPPSSEELQANKATLVCLISDFYPGAVTVAWKGDSSPVKAGVETTTPSKQSNNKYAASSYLSLTPEQWKSHRSYSCQVTHEGSTVEKTVAPTESS

SEQ ID NO: 272 - protein, 449 aa, synthetic construct
  REGION 1..449: note = Description of sequence: anti-mesothelin heavy chain sequence
VELVQSGAEVKKPGESLKISCKGSGYSFTSYWIGWVRQAPGKGLEWMGIIDPGDSRTRYSPSFQGQVTISADKSISTAYLQWSSLKASDTAMYYCARGQLYGGTYMDGWGQGTLVTVSSASTKGPSVFPLAPSSKSTSGGTAALGCLVKDYFPEPVTVSWNSGALTSGVHTFPAVLQSSGLYSLSSVVTVPSSSLGTQTYICNVNHKPSNTKVDKKVEPKSCDKTHTCPPCPAPELLGGPSVFLFPPKPKDTLMISRTPEVTCVVVDVSHEDPEVKFNWYVDGVEVHNAKTKPREEQYNSTYRVVSVLTVLHQDWLNGKEYKCKVSNKALPAPIEKTISKAKGQPREPQVYTLPPSRDELTKNQVSLTCLVKGFYPSDIAVEWESNGQPENNYKTTPPVLDSDGSFFLYSKLTVDKSRWQQGNVFSCSVMHEALHNHYTQKSLSLSPGK

SEQ ID NO: 273 - protein, 107 aa, synthetic construct
  REGION 1..107: note = Description of sequence: anti-mesothelin VL sequence
DIALTQPASVSGSPGQSITISCTGTSSDIGGYNSVSWYQQHPGKAPKLMIYGVNNRPSGVSNRFSGSKSGNTASLTISGLQAEDEADYYCSSYDIESATPVFGGGTK

SEQ ID NO: 274 - protein, 120 aa, synthetic construct
  REGION 1..120: note = Description of sequence: anti-mesothelin VH sequence
QVELVQSGAEVKKPGESLKISCKGSGYSFTSYWIGWVRQAPGKGLEWMGIIDPGDSRTRYSPSFQGQVTISADKSISTAYLQWSSLKASDTAMYYCARGQLYGGTYMDGWGQGTLVTVSS

SEQ ID NO: 275 - protein, 14 aa, synthetic construct
  REGION 1..14: note = Description of sequence: anti-mesothelin VL CDR1 sequence
TGTSSDIGGYNSVS

SEQ ID NO: 276 - protein, 11 aa, synthetic construct
  REGION 1..11: note = Description of sequence: anti-mesothelin VL CDR2 sequence
LMIYGVNNRPS

SEQ ID NO: 277 - protein, 10 aa, synthetic construct
  REGION 1..10: note = Description of sequence: anti-mesothelin VL CDR3 sequence
SSYDIESATP

SEQ ID NO: 278 - protein, 10 aa, synthetic construct
  REGION 1..10: note = Description of sequence: anti-mesothelin VH CDR1 sequence
GYSFTSYWIG

SEQ ID NO: 279 - protein, 16 aa, synthetic construct
  REGION 1..16: note = Description of sequence: anti-mesothelin VH CDR2 sequence
WMGIIDPGDSRTRYSP

SEQ ID NO: 280 - protein, 11 aa, synthetic construct
  REGION 1..11: note = Description of sequence: anti-mesothelin VH CDR3 sequence
GQLYGGTYMDG

SEQ ID NO: 281 - protein, 244 aa, synthetic construct
  REGION 1..244: note = Description of sequence: anti-mesothelin scFv sequence
QVQLQQSGAEVKKPGASVKVSCKASGYTFTGYYMHWVRQAPGQGLEWMGRINPNSGGTNYAQKFQGRVTMTRDTSISTAYMELSRLRSEDTAVYYCARGRYYGMDVWGQGTMVTVSSGGGGSGGGGSGGGGSGGGGSEIVLTQSPATLSLSPGERATISCRASQSVSSNFAWYQQRPGQAPRLLIYDASNRATGIPPRFSGSGSGTDFTLTISSLEPEDFAAYYCHQRSNWLYTFGQGTKVDIK

SEQ ID NO: 282 - protein, 253 aa, synthetic construct
  REGION 1..253: note = Description of sequence: anti-mesothelin scFv sequence
QVQLVQSGAEVKKPGASVKVSCKASGYTFTGYYMHWVRQAPGQGLEWMGWINPNSGGTNYAQKFQGRVTMTRDTSISTAYMELSRLRSDDTAVYYCARDLRRTVVTPRAYYGMDVWGQGTTVTVSSGGGGSGGGGSGGGGSGGGGSDIQLTQSPSTLSASVGDRVTITCQASQDISNSLNWYQQKAGKAPKLLIYDASTLETGVPSRFSGSGSGTDFSFTISSLQPEDIATYYCQQHDNLPLTFGQGTKVEIK

SEQ ID NO: 283 - protein, 109 aa, synthetic construct
  REGION 1..109: note = Description of sequence: anti-mesothelin antibody VL sequence
EIVLTQSPGTLSLSPGERATLSCRASQSVSSSYLAWYQQKPGQAPRLLIYGASSRATGIPDRFSGSGSGTDFTLTISRLEPEDFAVYYCQQYGSSPIFTFGPGTKVDIK

SEQ ID NO: 284 - protein, 124 aa, synthetic construct
  REGION 1..124: note = Description of sequence: anti-mesothelin antibody VH sequence
QMQLVESGGGVVQPGRSLRLSCTASGFTFSNNGMHWVRQAPGKGLEWVAVIWFDGMNKFYVDSVKGRFTISRDNSKNTLYLEMNSLRAEDTAIYYCAREGDGSGIYYYYGMDVWGQGTTVTVSS

SEQ ID NO: 285 - protein, 15 aa, synthetic construct
  REGION 1..15: note = Description of sequence: linker polypeptide sequence
GGGGSGGGGSGGGGS

SEQ ID NO: 286 - protein, 106 aa, synthetic construct
  REGION 1..106: note = Description of sequence: anti-mesothelin antibody VL sequence
DIELTQSPAIMSASPGEKVTMTCSASSSVSYMHWYQQKSGTSPKRWIYDTSKLASGVPGRFSGSGSGNSYSLTISSVEAEDDATYYCQQWSKHPLTFGSGTKVEIK

SEQ ID NO: 287 - protein, 119 aa, synthetic construct
  REGION 1..119: note = Description of sequence: anti-mesothelin antibody VH sequence
QVQLQQSGPELEKPGASVKISCKASGYSFTGYTMNWVKQSHGKSLEWIGLITPYNGASSYNQKFRGKATLTVDKSSSTAYMDLLSLTSEDSAVYFCARGGYDGRGFDYWGSGTPVTVSS

SEQ ID NO: 288 - protein, 112 aa, synthetic construct
  REGION 1..112: note = Description of sequence: anti-mesothelin antibody VL sequence
DIALTQPASVSGSPGQSITISCTGTSSDIGGYNSVSWYQQHPGKAPKLMIYGVNNRPSGVSNRFSGSKSGNTASLTISGLQAEDEADYYCSSYDIESATPVFGGGTKLTVLG

SEQ ID NO: 289 - protein, 120 aa, synthetic construct; identical to SEQ ID NO: 274
  REGION 1..120: note = Description of sequence: anti-mesothelin antibody VL sequence

SEQ ID NO: 290 - protein, 119 aa, synthetic construct
  REGION 1..119: note = Description of sequence: anti-mesothelin antibody VH sequence
QVQLVQSGAEVKKPGASVKVSCKASGYSFTGYTMNWVRQAPGQGLEWMGLITPYNGASSYNQKFRGKATMTVDTSTSTVYMELSSLRSEDTAVYYCARGGYDGRGFDYWGQGTLVTVSS

SEQ ID NO: 291 - protein, 248 aa, synthetic construct
  REGION 1..248: note = Description of sequence: anti-mesothelin scFv sequence
QMQLVESGGGVVQPGRSLRLSCTASGFTFSNNGMHWVRQAPGKGLEWVAVIWFDGMNKFYVDSVKGRFTISRDNSKNTLYLEMNSLRAEDTAIYYCAREGDGSGIYYYYGMDVWGQGTTVTVSSGGGGSGGGGSGGGGSEIVLTQSPGTLSLSPGERATLSCRASQSVSSSYLAWYQQKPGQAPRLLIYGASSRATGIPDRFSGSGSGTDFTLTISRLEPEDFAVYYCQQYGSSPIFTFGPGTKVDIK

SEQ ID NO: 292 - protein, 248 aa, synthetic construct
  REGION 1..248: note = Description of sequence: anti-mesothelin scFv sequence
EIVLTQSPGTLSLSPGERATLSCRASQSVSSSYLAWYQQKPGQAPRLLIYGASSRATGIPDRFSGSGSGTDFTLTISRLEPEDFAVYYCQQYGSSPIFTFGPGTKVDIKGGGGSGGGGSGGGGSQMQLVESGGGVVQPGRSLRLSCTASGFTFSNNGMHWVRQAPGKGLEWVAVIWFDGMNKFYVDSVKGRFTISRDNSKNTLYLEMNSLRAEDTAIYYCAREGDGSGIYYYYGMDVWGQGTTVTVSS

SEQ ID NO: 293 - protein, 240 aa, synthetic construct
  REGION 1..240: note = Description of sequence: anti-mesothelin scFv sequence
QVQLQQSGPELEKPGASVKISCKASGYSFTGYTMNWVKQSHGKSLEWIGLITPYNGASSYNQKFRGKATLTVDKSSSTAYMDLLSLTSEDSAVYFCARGGYDGRGFDYWGSGTPVTVSSGGGGSGGGGSGGGGSDIELTQSPAIMSASPGEKVTMTCSASSSVSYMHWYQQKSGTSPKRWIYDTSKLASGVPGRFSGSGSGNSYSLTISSVEAEDDATYYCQQWSKHPLTFGSGTKVEIK

SEQ ID NO: 294 - protein, 240 aa, synthetic construct
  REGION 1..240: note = Description of sequence: anti-mesothelin scFv sequence
DIELTQSPAIMSASPGEKVTMTCSASSSVSYMHWYQQKSGTSPKRWIYDTSKLASGVPGRFSGSGSGNSYSLTISSVEAEDDATYYCQQWSKHPLTFGSGTKVEIKGGGGSGGGGSGGGGSQVQLQQSGPELEKPGASVKISCKASGYSFTGYTMNWVKQSHGKSLEWIGLITPYNGASSYNQKFRGKATLTVDKSSSTAYMDLLSLTSEDSAVYFCARGGYDGRGFDYWGSGTPVTVSS

SEQ ID NO: 295 - protein, 247 aa, synthetic construct
  REGION 1..247: note = Description of sequence: anti-mesothelin scFv sequence
QVELVQSGAEVKKPGESLKISCKGSGYSFTSYWIGWVRQAPGKGLEWMGIIDPGDSRTRYSPSFQGQVTISADKSISTAYLQWSSLKASDTAMYYCARGQLYGGTYMDGWGQGTLVTVSSGGGGSGGGGSGGGGSDIALTQPASVSGSPGQSITISCTGTSSDIGGYNSVSWYQQHPGKAPKLMIYGVNNRPSGVSNRFSGSKSGNTASLTISGLQAEDEADYYCSSYDIESATPVFGGGTKLTVLG

SEQ ID NO: 296 - protein, 247 aa, synthetic construct
  REGION 1..247: note = Description of sequence: anti-mesothelin scFv sequence
DIALTQPASVSGSPGQSITISCTGTSSDIGGYNSVSWYQQHPGKAPKLMIYGVNNRPSGVSNRFSGSKSGNTASLTISGLQAEDEADYYCSSYDIESATPVFGGGTKLTVLGGGGGSGGGGSGGGGSQVELVQSGAEVKKPGESLKISCKGSGYSFTSYWIGWVRQAPGKGLEWMGIIDPGDSRTRYSPSFQGQVTISADKSISTAYLQWSSLKASDTAMYYCARGQLYGGTYMDGWGQGTLVTVSS

SEQ ID NO: 297 - protein, 240 aa, synthetic construct
  REGION 1..240: note = Description of sequence: anti-mesothelin scFv sequence
QVQLVQSGAEVKKPGASVKVSCKASGYSFTGYTMNWVRQAPGQGLEWMGLITPYNGASSYNQKFRGKATMTVDTSTSTVYMELSSLRSEDTAVYYCARGGYDGRGFDYWGQGTLVTVSSGGGGSGGGGSGGGGSDIQMTQSPSSLSASVGDRVTITCSASSSVSYMHWYQQKSGKAPKLLIYDTSKLASGVPSRFSGSGSGTDFTLTISSLQPEDFATYYCQQWSKHPLTFGQGTKLEIK

SEQ ID NO: 298 - protein, 240 aa, synthetic construct
  REGION 1..240: note = Description of sequence: anti-mesothelin scFv sequence
DIQMTQSPSSLSASVGDRVTITCSASSSVSYMHWYQQKSGKAPKLLIYDTSKLASGVPSRFSGSGSGTDFTLTISSLQPEDFATYYCQQWSKHPLTFGQGTKLEIKGGGGSGGGGSGGGGSQVQLVQSGAEVKKPGASVKVSCKASGYSFTGYTMNWVRQAPGQGLEWMGLITPYNGASSYNQKFRGKATMTVDTSTSTVYMELSSLRSEDTAVYYCARGGYDGRGFDYWGQGTLVTVSS

SEQ ID NO: 299 - protein, 10 aa, synthetic construct
  REGION 1..10: note = Description of sequence: anti-CD22 VL CDR1 sequence
GDSVSSNSAA

SEQ ID NO: 300 - protein, 9 aa, synthetic construct
  REGION 1..9: note = Description of sequence: anti-CD22 VL CDR2 sequence
TYYRSKWYN

SEQ ID NO: 301 - protein, 14 aa, synthetic construct
  REGION 1..14: note = Description of sequence: anti-CD22 VL CDR3 sequence
AREVTGDLEDAFDI

SEQ ID NO: 302 - protein, 6 aa, synthetic construct
  REGION 1..6: note = Description of sequence: anti-CD22 VH CDR1 sequence
QTIWSY

SEQ ID NO: 303 - protein, 9 aa, synthetic construct
  REGION 1..9: note = Description of sequence: anti-CD22 VH CDR3 sequence
QQSYSIPQT

SEQ ID NO: 304 - protein, 11 aa, synthetic construct
  REGION 1..11: note = Description of sequence: anti-TROP2 VL CDR1 sequence
KASQDVSIAVA

SEQ ID NO: 305 - protein, 7 aa, synthetic construct
  REGION 1..7: note = Description of sequence: anti-TROP2 VL CDR2 sequence
SASYRYT

SEQ ID NO: 306 - protein, 9 aa, synthetic construct
  REGION 1..9: note = Description of sequence: anti-TROP2 VL CDR3 sequence
QQHYITPLT

SEQ ID NO: 307 - protein, 5 aa, synthetic construct
  REGION 1..5: note = Description of sequence: anti-TROP2 VH CDR1 sequence
NYGMN

SEQ ID NO: 308 - protein, 17 aa, synthetic construct
  REGION 1..17: note = Description of sequence: anti-TROP2 VH CDR2 sequence
WINTYTGEPTYTDDFKG

SEQ ID NO: 309 - protein, 12 aa, synthetic construct
  REGION 1..12: note = Description of sequence: anti-TROP2 VH CDR3 sequence
GGFGSSYWYFDV

SEQ ID NO: 310 - protein, 5 aa, synthetic construct
  REGION 1..5: note = Description of sequence: anti-TROP2 VH CDR1 sequence
TAGMQ

SEQ ID NO: 311 - protein, 17 aa, synthetic construct
  REGION 1..17: note = Description of sequence: anti-TROP2 VH CDR2 sequence
WINTHSGVPKYAEDFKG

SEQ ID NO: 312 - protein, 12 aa, synthetic construct
  REGION 1..12: note = Description of sequence: anti-TROP2 VH CDR3 sequence
SGFGSSYWYFDV

SEQ ID NO: 313 - protein, 11 aa, synthetic construct
  REGION 1..11: note = Description of sequence: anti-TROP2 VL CDR1 sequence
KASQDVSTAVA

SEQ ID NO: 314 - protein, 107 aa, synthetic construct
  REGION 1..107: note = Description of sequence: anti-TROP2 VL sequence
DIQLTQSPSSLSASVGDRVSITCKASQDVSIAVAWYQQKPGKAPKLLIYSASYRYTGVPDRFSGSGSGTDFTLTISSLQPEDFAVYYCQQHYITPLTFGAGTKVEIK

SEQ ID NO: 315 - protein, 121 aa, synthetic construct
  REGION 1..121: note = Description of sequence: anti-TROP2 VH sequence
QVQLQQSGSELKKPGASVKVSCKASGYTFTNYGMNWVKQAPGQGLKWMGWINTYTGEPTYTDDFKGRFAFSLDTSVSTAYLQISSLKADDTAVYFCARGGFGSSYWYFDVWGQGSLVTVSS

SEQ ID NO: 316 - protein, 99 aa, synthetic construct
  REGION 1..99: note = Description of sequence: anti-TROP2 VL sequence
SSLSASVGDRVTITCKASQDVSTAVAWYQQKPGKAPKLLIYSASYRYTGVPSRFSGSGSGTDFTLTISSLQPEDFAVYYCQQHYITPLTFGQGTKLEIK

SEQ ID NO: 317 - protein, 121 aa, synthetic construct
  REGION 1..121: note = Description of sequence: anti-TROP2 VH sequence
QVQLVQSGAEVKKPGASVKVSCKASGYTFTTAGMQWVRQAPGQGLEWMGWINTHSGVPKYAEDFKGRVTISADTSTSTAYLQLSSLKSEDTAVYYCARSGFGSSYWYFDVWGQGTLVTVSS

SEQ ID NO: 318 - protein, 217 aa, synthetic construct
  REGION 1..217: note = Description of sequence: anti-BCMA VL sequence
QSVLTQPPSASGTPGQRVTISCSGSSSNIGSNTVNWYQQLPGTAPKLLIFNYHQRPSGVPDRFSGSKSGSSASLAISGLQSEDEADYYCAAWDDSLNGWVFGGGTKLTVLGQPKAAPSVTLFPPSSEELQANKATLVCLISDFYPGAVTVAWKADSSPVKAGVETTTPDSKQSNNKYAASSYLSLTPEQWKSHRSYSCQVTHEGSTVEKTVAPTECS

SEQ ID NO: 319 - protein, 458 aa, synthetic construct
  REGION 1..458: note = Description of sequence: anti-BCMA heavy chain sequence
EVQLVESGGGLVKPGGSLRLSCAASGFTFGDYALSWFRQAPGKGLEWVGVSRSKAYGGTTDYAASVKGRFTISRDDSKSTAYLQMNSLKTEDTAVYYCASSGYSSGWTPFDYWGQGTLVTVSSASTKGPSVFPLAPSSKSTSGGTAALGCLVKDYFPEPVTVSWNSGALTSGVHTFPAVLQSSGLYSLSSVVTVPSSSLGTQTYICNVNHKPSNTKVDKKVEPKSCDKTHTCPPCPAPELLGGPSVFLFPPKPKDTLMISRTPEVTCVVVDVSHEDPEVKFNWYVDGVEVHNAKTKPREEQYNSTYRVVSVLTVLHQDWLNGKEYKCKVSNKALPAPIEKTISKAKGQPREPQVYTLPPSREEMTKNQVSLTCLVKGFYPSDIAVEWESNGQPENNYKTTPPVLDSDGSFFLYSKLTVDKSRWQQGNVFSCSVMHEALHNHYTQKSLSLSPGKSEQID

SEQ ID NO: 320 - protein, 111 aa, synthetic construct
  REGION 1..111: note = Description of sequence: anti-BCMA VL sequence
QSVLTQPPSASGTPGQRVTISCSGSSSNIGSNTVNWYQQLPGTAPKLLIFNYHQRPSGVPDRFSGSKSGSSASLAISGLQSEDEADYYCAAWDDSLNGWVFGGGTKLTVLG

SEQ ID NO: 321 - protein, 131 aa, synthetic construct
  REGION 1..131: note = Description of sequence: anti-BCMA VH sequence
EVQLVESGGGLVKPGGSLRLSCAASGFTFGDYALSWFRQAPGKGLEWVGVSRSKAYGGTTDYAASVKGRFTISRDDSKSTAYLQMNSLKTEDTAVYYCASSGYSSGWTPFDYWGQGTLVTVSSASTKGPSV

SEQ ID NO: 322 - protein, 7 aa, synthetic construct
  REGION 1..7: note = Description of sequence: anti-BCMA VL CDR1 sequence
SSNIGSN

SEQ ID NO: 323 - protein, 11 aa, synthetic construct
  REGION 1..11: note = Description of sequence: anti-BCMA VL CDR3 sequence
AAWDDSLNGWV

SEQ ID NO: 324 - protein, 8 aa, synthetic construct
  REGION 1..8: note = Description of sequence: anti-BCMA VH CDR1 sequence
GFTFGDYA

SEQ ID NO: 325 - protein, 10 aa, synthetic construct
  REGION 1..10: note = Description of sequence: anti-BCMA VH CDR2 sequence
SRSKAYGGTT

SEQ ID NO: 326 - protein, 14 aa, synthetic construct
  REGION 1..14: note = Description of sequence: anti-BCMA VH CDR3 sequence
ASSGYSSGWTPFDY

SEQ ID NO: 327 - protein, 249 aa, synthetic construct
  REGION 1..249: note = Description of sequence: anti-BCMA scFV sequence
QVQLVQSGAEVKKPGSSVKVSCKASGGTFSNYWMHWVRQAPGQGLEWMGATYRGHSDTYYNQKFKGRVTITADKSTSTAYMELSSLRSEDTAVYYCARGAIYNGYDVLDNWGQGTLVTVSSGGGGSGGGGSGGGGSGGGGSDIQMTQSPSSLSASVGDRVTITCSASQDISNYLNWYQQKPGKAPKLLIYYTSNLHSGVPSRFSGSGSGTDFTLTISSLQPEDFATYYCQQYRKLPWTFGQGTKLEIKR

SEQ ID NO: 328 - protein, 249 aa, synthetic construct
  REGION 1..249: note = Description of sequence: anti-BCMA scFV sequence
DIQMTQSPSSLSASVGDRVTITCSASQDISNYLNWYQQKPGKAPKLLIYYTSNLHSGVPSRFSGSGSGTDFTLTISSLQPEDFATYYCQQYRKLPWTFGQGTKLEIKRGGGGSGGGGSGGGGSGGGGSQVQLVQSGAEVKKPGSSVKVSCKASGGTFSNYWMHWVRQAPGQGLEWMGATYRGHSDTYYNQKFKGRVTITADKSTSTAYMELSSLRSEDTAVYYCARGAIYNGYDVLDNWGQGTLVTVSS

SEQ ID NO: 329 - protein, 11 aa, synthetic construct
  REGION 1..11: note = Description of sequence: anti-BCMA VL CDR1 sequence
SASQDISNYLN

SEQ ID NO: 330 - protein, 7 aa, synthetic construct
  REGION 1..7: note = Description of sequence: anti-BCMA VL CDR2 sequence
YTSNLHS

SEQ ID NO: 331 - protein, 9 aa, synthetic construct
  REGION 1..9: note = Description of sequence: anti-BCMA VL CDR3 sequence
QQYRKLPWT

SEQ ID NO: 332 - protein, 5 aa, synthetic construct
  REGION 1..5: note = Description of sequence: anti-BCMA VH CDR1 sequence
NYWMH

SEQ ID NO: 333 - protein, 17 aa, synthetic construct
  REGION 1..17: note = Description of sequence: anti-BCMA VH CDR2 sequence
ATYRGHSDTYYNQKFKG

SEQ ID NO: 334 - protein, 12 aa, synthetic construct
  REGION 1..12: note = Description of sequence: anti-BCMA VH CDR3 sequence
GAIYNGYDVLDN

SEQ ID NO: 335 - protein, 108 aa, synthetic construct
  REGION 1..108: note = Description of sequence: anti-BCMA light chain sequence
DIQMTQSPSSLSASVGDRVTITCSASQDISNYLNWYQQKPGKAPKLLIYYTSNLHSGVPSRFSGSGSGTDFTLTISSLQPEDFATYYCQQYRKLPWTFGQGTKLEIKR

SEQ ID NO: 336 - protein, 121 aa, synthetic construct
  REGION 1..121: note = Description of sequence: anti-BCMA heavy chain sequence
QVQLVQSGAEVKKPGSSVKVSCKASGGTFSNYWMHWVRQAPGQGLEWMGATYRGHSDTYYNQKFKGRVTITADKSTSTAYMELSSLRSEDTAVYYCARGAIYDGYDVLDNWGQGTLVTVSS

SEQ ID NO: 337 - protein, 20 aa, synthetic construct
  REGION 1..20: note = Description of sequence: MUC1 peptide
VTSAPDTRPAPGSTAPPAHG

SEQ ID NO: 338 - protein, 43 aa, synthetic construct
  REGION 1..43: note = Description of sequence: MUC1 peptide
SNIKFRPGSVVVQLTLAFREGTINVHDVETQFNQYKTEAASRY

SEQ ID NO: 339 - protein, 35 aa, synthetic construct
  REGION 1..35: note = Description of sequence: MUC1 peptide
SVVVQLTLAFREGTINVHDVETQFNQYKTEAASRY

SEQ ID NO: 340 - protein, 20 aa, synthetic construct
  REGION 1..20: note = Description of sequence: MUC1 peptide
LAFREGTINVHDVETQFNQY

SEQ ID NO: 341 - protein, 25 aa, synthetic construct
  REGION 1..25: note = Description of sequence: MUC1 peptide
SNIKFRPGSVVVQLTLAAFREGTIN

SEQ ID NO: 342 - protein, 5 aa, synthetic construct
  REGION 1..5: note = Description of sequence: anti-MUC1 VH CDR1 sequence
RYGMS

SEQ ID NO: 343 - protein, 17 aa, synthetic construct
  REGION 1..17: note = Description of sequence: anti-MUC1 VH CDR2 sequence
TISGGGTYIYYPDSVKG

SEQ ID NO: 344 - protein, 13 aa, synthetic construct
  REGION 1..13: note = Description of sequence: anti-MUC1 VH CDR3 sequence
DNYGRNYDYGMDY

SEQ ID NO: 345 - protein, 10 aa, synthetic construct
  REGION 1..10: note = Description of sequence: anti-MUC1 VL CDR1 sequence
SATSSVSYIH

SEQ ID NO: 346 - protein, 7 aa, synthetic construct
  REGION 1..7: note = Description of sequence: anti-MUC1 VL CDR2 sequence
STSNLAS

SEQ ID NO: 347 - protein, 9 aa, synthetic construct
  REGION 1..9: note = Description of sequence: anti-MUC1 VL CDR3 sequence
QQRSSSPFT

SEQ ID NO: 348 - protein, 5 aa, synthetic construct
  REGION 1..5: note = Description of sequence: anti-MUC1 VH CDR1 sequence
GYAMS

SEQ ID NO: 349 - protein, 17 aa, synthetic construct
  REGION 1..17: note = Description of sequence: anti-MUC1 VH CDR2 sequence
TISSGGTYIYYPDSVKG

SEQ ID NO: 350 - protein, 12 aa, synthetic construct
  REGION 1..12: note = Description of sequence: anti-MUC1 VH CDR3 sequence
LGGDNYYEYFDV

SEQ ID NO: 351 - protein, 15 aa, synthetic construct
  REGION 1..15: note = Description of sequence: anti-MUC1 VL CDR1 sequence
RASKSVSTSGYSYMH

SEQ ID NO: 352 - protein, 7 aa, synthetic construct
  REGION 1..7: note = Description of sequence: anti-MUC1 VL CDR2 sequence
LASNLES

SEQ ID NO: 353 - protein, 9 aa, synthetic construct
  REGION 1..9: note = Description of sequence: anti-MUC1 VL CDR3 sequence
QHSRELPFT

SEQ ID NO: 354 - protein, 5 aa, synthetic construct
  REGION 1..5: note = Description of sequence: anti-MUC1 VH CDR1 sequence
DYAMN

SEQ ID NO: 355 - protein, 17 aa, synthetic construct
  REGION 1..17: note = Description of sequence: anti-MUC1 VH CDR2 sequence
VISTFSGNINFNQKFKG

SEQ ID NO: 356 - protein, 10 aa, synthetic construct
  REGION 1..10: note = Description of sequence: anti-MUC1 VH CDR3 sequence
SDYYGPYFDY

SEQ ID NO: 357 - protein, 16 aa, synthetic construct
  REGION 1..16: note = Description of sequence: anti-MUC1 VL CDR1 sequence
RSSQTIVHSNGNTYLE

SEQ ID NO: 358 - protein, 7 aa, synthetic construct
  REGION 1..7: note = Description of sequence: anti-MUC1 VL CDR2 sequence
KVSNRFS

SEQ ID NO: 359 - protein, 9 aa, synthetic construct
  REGION 1..9: note = Description of sequence: anti-MUC1 VL CDR3 sequence
FQGSHVPFT

SEQ ID NO: 360 - protein, 9 aa, synthetic construct
  REGION 1..9: note = Description of sequence: anti-MUC1 VH CDR3sequence
LGGDNYYEY

SEQ ID NO: 361 - protein, 15 aa, synthetic construct
  REGION 1..15: note = Description of sequence: anti-MUC1 VL CDR1 sequence
TASKSVSTSGYSYMH

SEQ ID NO: 362 - protein, 7 aa, synthetic construct
  REGION 1..7: note = Description of sequence: anti-MUC1 VL CDR2 sequence
LVSNLES

SEQ ID NO: 363 - protein, 10 aa, synthetic construct
  REGION 1..10: note = Description of sequence: anti-MUC1 VL CDR3 sequence
QHIRELTRSE

SEQ ID NO: 364 - protein, 8 aa, synthetic construct
  REGION 1..8: note = Description of sequence: anti-MUC16 VH CDR1 sequence
GFTFSNYY

SEQ ID NO: 365 - protein, 8 aa, synthetic construct
  REGION 1..8: note = Description of sequence: anti-MUC16 VH CDR2 sequence
ISGRGSTI

SEQ ID NO: 366 - protein, 10 aa, synthetic construct
  REGION 1..10: note = Description of sequence: anti-MUC16 VH CDR3 sequence
VKDRGGYSPY

SEQ ID NO: 367 - protein, 6 aa, synthetic construct
  REGION 1..6: note = Description of sequence: anti-MUC16 VL CDR1 sequence
QSISTY

SEQ ID NO: 368 - protein, 10 aa, synthetic construct
  REGION 1..10: note = Description of sequence: anti-MUC16 VL CDR3 sequence
QQSYSTPPIT

SEQ ID NO: 369 - protein, 8 aa, synthetic construct
  REGION 1..8: note = Description of sequence: anti-CLAUDIN -18.2 VH CDR1 sequence
GYTFTDYS

SEQ ID NO: 370 - protein, 8 aa, synthetic construct
  REGION 1..8: note = Description of sequence: anti-CLAUDIN -18.2 VH CDR2 sequence
INTETGVP

SEQ ID NO: 371 - protein, 8 aa, synthetic construct
  REGION 1..8: note = Description of sequence: anti-CLAUDIN -18.2 VH CDR3 sequence
ARRTGFDY

SEQ ID NO: 372 - protein, 11 aa, synthetic construct
  REGION 1..11: note = Description of sequence: anti-CLAUDIN -18.2 VL CDR1 sequence
KNLLHSDGITY

SEQ ID NO: 373 - protein, 9 aa, synthetic construct
  REGION 1..9: note = Description of sequence: anti-CLAUDIN -18.2 1 VL CDR3 sequence
VQVLELPFT

SEQ ID NO: 374 - protein, 8 aa, synthetic construct
  REGION 1..8: note = Description of sequence: anti-CLAUDIN -18.2 VH CDR1 sequence
GFTFSSYA

SEQ ID NO: 375 - protein, 8 aa, synthetic construct
  REGION 1..8: note = Description of sequence: anti-CLAUDIN -18.2 VH CDR2 sequence
ISDGGSYS

SEQ ID NO: 376 - protein, 14 aa, synthetic construct
  REGION 1..14: note = Description of sequence: anti-CLAUDIN -18.2 VH CDR3 sequence
ARDSYYDNSYVRDY

SEQ ID NO: 377 - protein, 6 aa, synthetic construct
  REGION 1..6: note = Description of sequence: anti-CLAUDIN -18.2 VL CDR1 sequence
QDINTF

SEQ ID NO: 378 - protein, 9 aa, synthetic construct
  REGION 1..9: note = Description of sequence: anti-CLAUDIN -18.2 1 VL CDR3 sequence
LQYDEFPLT

SEQ ID NO: 379 - protein, 9 aa, synthetic construct
  REGION 1..9: note = Description of sequence: epitope presenting peptide
VVDDPIHFY

SEQ ID NO: 380 - protein, 9 aa, synthetic construct
  REGION 1..9: note = Description of sequence: epitope presenting peptide
LFYDANYFL

SEQ ID NO: 381 - protein, 9 aa, synthetic construct
  REGION 1..9: note = Description of sequence: epitope presenting peptide
GLMWLSYFV

SEQ ID NO: 382 - protein, 9 aa, synthetic construct
  REGION 1..9: note = Description of sequence: epitope presenting peptide
GLMWLSYFI

SEQ ID NO: 383 - protein, 10 aa, synthetic construct
  REGION 1..10: note = Description of sequence: epitope presenting peptide
TLACFVLAAV

SEQ ID NO: 384 - protein, 9 aa, synthetic construct
  REGION 1..9: note = Description of sequence: epitope presenting peptide
ALNTPKDHI

SEQ ID NO: 385 - protein, 9 aa, synthetic construct
  REGION 1..9: note = Description of sequence: epitope presenting peptide
GMSRIGMEV

SEQ ID NO: 386 - protein, 9 aa, synthetic construct
  REGION 1..9: note = Description of sequence: epitope presenting peptide
LALLLLDRL

SEQ ID NO: 387 - protein, 9 aa, synthetic construct
  REGION 1..9: note = Description of sequence: epitope presenting peptide
LLLDRLNQL

SEQ ID NO: 388 - protein, 9 aa, synthetic construct
  REGION 1..9: note = Description of sequence: epitope presenting peptide
LQLPQGTTL

SEQ ID NO: 389 - protein, 9 aa, synthetic construct
  REGION 1..9: note = Description of sequence: epitope presenting peptide
RLNQLESKV

SEQ ID NO: 390 - protein, 9 aa, synthetic construct
  REGION 1..9: note = Description of sequence: epitope presenting peptide
RLNQLESKM

SEQ ID NO: 391 - protein, 9 aa, synthetic construct
  REGION 1..9: note = Description of sequence: epitope presenting peptide
ALSGVFCGV

SEQ ID NO: 392 - protein, 9 aa, synthetic construct
  REGION 1..9: note = Description of sequence: epitope presenting peptide
SLPGVFCGV

SEQ ID NO: 393 - protein, 9 aa, synthetic construct
  REGION 1..9: note = Description of sequence: epitope presenting peptide
CLDAGINYV

SEQ ID NO: 394 - protein, 9 aa, synthetic construct
  REGION 1..9: note = Description of sequence: epitope presenting peptide
CLEASFNYL

SEQ ID NO: 395 - protein, 9 aa, synthetic construct
  REGION 1..9: note = Description of sequence: epitope presenting peptide
ILLLDQVLV

SEQ ID NO: 396 - protein, 9 aa, synthetic construct
  REGION 1..9: note = Description of sequence: epitope presenting peptide
ILLLDQALV

SEQ ID NO: 397 - protein, 9 aa, synthetic construct
  REGION 1..9: note = Description of sequence: epitope presenting peptide
LLCVLAALV

SEQ ID NO: 398 - protein, 9 aa, synthetic construct
  REGION 1..9: note = Description of sequence: epitope presenting peptide
SACVLAAEC

SEQ ID NO: 399 - protein, 9 aa, synthetic construct
  REGION 1..9: note = Description of sequence: epitope presenting peptide
SMWALVISV

SEQ ID NO: 400 - protein, 9 aa, synthetic construct
  REGION 1..9: note = Description of sequence: epitope presenting peptide
SMWALIISV

SEQ ID NO: 401 - protein, 9 aa, synthetic construct
  REGION 1..9: note = Description of sequence: epitope presenting peptide
TLMNVITLV

SEQ ID NO: 402 - protein, 9 aa, synthetic construct
  REGION 1..9: note = Description of sequence: epitope presenting peptide
TLMNVLTLV

SEQ ID NO: 403 - protein, 9 aa, synthetic construct
  REGION 1..9: note = Description of sequence: epitope presenting peptide
WLMWFIISI

SEQ ID NO: 404 - protein, 9 aa, synthetic construct
  REGION 1..9: note = Description of sequence: epitope presenting peptide
WLMWLIINL

SEQ ID NO: 405 - protein, 9 aa, synthetic construct
  REGION 1..9: note = Description of sequence: epitope presenting peptide
ALNTLVKQL

SEQ ID NO: 406 - protein, 9 aa, synthetic construct
  REGION 1..9: note = Description of sequence: epitope presenting peptide
FIAGLIAIV

SEQ ID NO: 407 - protein, 10 aa, synthetic construct
  REGION 1..10: note = Description of sequence: epitope presenting peptide
KLPDDFMGCV

SEQ ID NO: 408 - protein, 10 aa, synthetic construct
  REGION 1..10: note = Description of sequence: epitope presenting peptide
KLPDDFTGCV

SEQ ID NO: 409 - protein, 9 aa, synthetic construct
  REGION 1..9: note = Description of sequence: epitope presenting peptide
LITGRLQSL

SEQ ID NO: 410 - protein, 9 aa, synthetic construct
  REGION 1..9: note = Description of sequence: epitope presenting peptide
NLNESLIDL

SEQ ID NO: 411 - protein, 9 aa, synthetic construct
  REGION 1..9: note = Description of sequence: epitope presenting peptide
RLNEVAKNL

SEQ ID NO: 412 - protein, 9 aa, synthetic construct
  REGION 1..9: note = Description of sequence: epitope presenting peptide
SIVAYTMSL

SEQ ID NO: 413 - protein, 9 aa, synthetic construct
  REGION 1..9: note = Description of sequence: epitope presenting peptide
SIIAYTMSL

SEQ ID NO: 414 - protein, 9 aa, synthetic construct
  REGION 1..9: note = Description of sequence: epitope presenting peptide
VLNDILSRL

SEQ ID NO: 415 - protein, 9 aa, synthetic construct
  REGION 1..9: note = Description of sequence: epitope presenting peptide
QFKDNVILL

SEQ ID NO: 416 - protein, 9 aa, synthetic construct
  REGION 1..9: note = Description of sequence: epitope presenting peptide
NFKDQVILL

SEQ ID NO: 417 - protein, 10 aa, synthetic construct
  REGION 1..10: note = Description of sequence: epitope presenting peptide
GETALALLLL

SEQ ID NO: 418 - protein, 10 aa, synthetic construct
  REGION 1..10: note = Description of sequence: epitope presenting peptide
GDAALALLLL

SEQ ID NO: 419 - protein, 10 aa, synthetic construct
  REGION 1..10: note = Description of sequence: epitope presenting peptide
MEVTPSGTWL

SEQ ID NO: 420 - protein, 15 aa, synthetic construct
  REGION 1..15: note = Description of sequence: epitope presenting peptide
RFFTLGSITAQPVKI

SEQ ID NO: 421 - protein, 15 aa, synthetic construct
  REGION 1..15: note = Description of sequence: epitope presenting peptide
RIFTIGTVTLKQGEI

SEQ ID NO: 422 - protein, 9 aa, synthetic construct
  REGION 1..9: note = Description of sequence: epitope presenting peptide
SITAQPVKI

SEQ ID NO: 423 - protein, 9 aa, synthetic construct
  REGION 1..9: note = Description of sequence: epitope presenting peptide
TVTLKQGEI

SEQ ID NO: 424 - protein, 9 aa, synthetic construct
  REGION 1..9: note = Description of sequence: epitope presenting peptide
HLRMAGHSL

SEQ ID NO: 425 - protein, 9 aa, synthetic construct
  REGION 1..9: note = Description of sequence: epitope presenting peptide
HLRIAGHHL

SEQ ID NO: 426 - protein, 10 aa, synthetic construct
  REGION 1..10: note = Description of sequence: epitope presenting peptide
TKQYNVTQAF

SEQ ID NO: 427 - protein, 10 aa, synthetic construct
  REGION 1..10: note = Description of sequence: epitope presenting peptide
TKAYNVTQAF

SEQ ID NO: 428 - protein, 10 aa, synthetic construct
  REGION 1..10: note = Description of sequence: epitope presenting peptide
STQDLFLPFF

SEQ ID NO: 429 - protein, 11 aa, synthetic construct
  REGION 1..11: note = Description of sequence: epitope presenting peptide
YYVGYLQPRTF

SEQ ID NO: 430 - protein, 11 aa, synthetic construct
  REGION 1..11: note = Description of sequence: epitope presenting peptide
FCNDPFLGVYY

SEQ ID NO: 431 - protein, 9 aa, synthetic construct
  REGION 1..9: note = Description of sequence: epitope presenting peptide
NYNYLYRLF

SEQ ID NO: 432 - protein, 10 aa, synthetic construct
  REGION 1..10: note = Description of sequence: epitope presenting peptide
SSANNCTFEY

SEQ ID NO: 433 - protein, 9 aa, synthetic construct
  REGION 1..9: note = Description of sequence: epitope presenting peptide
YFPLQSYGF

SEQ ID NO: 434 - protein, 11 aa, synthetic construct
  REGION 1..11: note = Description of sequence: epitope presenting peptide
STECSNLLLQY

SEQ ID NO: 435 - protein, 12 aa, synthetic construct
  REGION 1..12: note = Description of sequence: epitope presenting peptide
VYDPLQPELDSF

SEQ ID NO: 436 - protein, 10 aa, synthetic construct
  REGION 1..10: note = Description of sequence: epitope presenting peptide
YTNSFTRGVY

SEQ ID NO: 437 - protein, 11 aa, synthetic construct
  REGION 1..11: note = Description of sequence: epitope presenting peptide
YEQYIKWPWYI

SEQ ID NO: 438 - protein, 9 aa, synthetic construct
  REGION 1..9: note = Description of sequence: epitope presenting peptide
CVADYSVLY

SEQ ID NO: 439 - protein, 10 aa, synthetic construct
  REGION 1..10: note = Description of sequence: epitope presenting peptide
KWPWYIWLGF

SEQ ID NO: 440 - protein, 9 aa, synthetic construct
  REGION 1..9: note = Description of sequence: epitope presenting peptide
LTDEMIAQY

SEQ ID NO: 441 - protein, 9 aa, synthetic construct
  REGION 1..9: note = Description of sequence: epitope presenting peptide
GTITSGWTF

SEQ ID NO: 442 - protein, 9 aa, synthetic construct
  REGION 1..9: note = Description of sequence: epitope presenting peptide
KIADYNYKL

SEQ ID NO: 443 - protein, 9 aa, synthetic construct
  REGION 1..9: note = Description of sequence: epitope presenting peptide
QYIKWPWYI

SEQ ID NO: 444 - protein, 9 aa, synthetic construct
  REGION 1..9: note = Description of sequence: epitope presenting peptide
RFDNPVLPF

SEQ ID NO: 445 - protein, 11 aa, synthetic construct
  REGION 1..11: note = Description of sequence: epitope presenting peptide
SFELLHAPATV

SEQ ID NO: 446 - protein, 10 aa, synthetic construct
  REGION 1..10: note = Description of sequence: epitope presenting peptide
EILDITPCSF

SEQ ID NO: 447 - protein, 9 aa, synthetic construct
  REGION 1..9: note = Description of sequence: epitope presenting peptide
LLFNKVTLA

SEQ ID NO: 448 - protein, 9 aa, synthetic construct
  REGION 1..9: note = Description of sequence: epitope presenting peptide
FVFKNIDGY

SEQ ID NO: 449 - protein, 10 aa, synthetic construct
  REGION 1..10: note = Description of sequence: epitope presenting peptide
SVASQSIIAY

SEQ ID NO: 450 - protein, 9 aa, synthetic construct
  REGION 1..9: note = Description of sequence: epitope presenting peptide
RLDKVEAEV

SEQ ID NO: 451 - protein, 9 aa, synthetic construct
  REGION 1..9: note = Description of sequence: epitope presenting peptide
WTAGAAAYY

SEQ ID NO: 452 - protein, 9 aa, synthetic construct
  REGION 1..9: note = Description of sequence: epitope presenting peptide
RLQSLQTYV

SEQ ID NO: 453 - protein, 9 aa, synthetic construct
  REGION 1..9: note = Description of sequence: epitope presenting peptide
VASQSIIAY

SEQ ID NO: 454 - protein, 9 aa, synthetic construct
  REGION 1..9: note = Description of sequence: epitope presenting peptide
HLMSFPQSA

SEQ ID NO: 455 - protein, 9 aa, synthetic construct
  REGION 1..9: note = Description of sequence: epitope presenting peptide
TPINLVRDL

SEQ ID NO: 456 - protein, 9 aa, synthetic construct
  REGION 1..9: note = Description of sequence: epitope presenting peptide
SPRRARSVA

SEQ ID NO: 457 - protein, 10 aa, synthetic construct
  REGION 1..10: note = Description of sequence: epitope presenting peptide
APHGVVFLHV

SEQ ID NO: 458 - protein, 8 aa, synthetic construct
  REGION 1..8: note = Description of sequence: epitope presenting peptide
LPQGFSAL

SEQ ID NO: 459 - protein, 9 aa, synthetic construct
  REGION 1..9: note = Description of sequence: epitope presenting peptide
VVFLHVTYV

SEQ ID NO: 460 - protein, 8 aa, synthetic construct
  REGION 1..8: note = Description of sequence: epitope presenting peptide
QPYRVVVL

SEQ ID NO: 461 - protein, 9 aa, synthetic construct
  REGION 1..9: note = Description of sequence: epitope presenting peptide
YLQPRTFLL

SEQ ID NO: 462 - protein, 9 aa, synthetic construct
  REGION 1..9: note = Description of sequence: epitope presenting peptide
MIAQYTSAL

SEQ ID NO: 463 - protein, 11 aa, synthetic construct
  REGION 1..11: note = Description of sequence: epitope presenting peptide
FPQSAPHGVVF

SEQ ID NO: 464 - protein, 9 aa, synthetic construct
  REGION 1..9: note = Description of sequence: epitope presenting peptide
TLDSKTQSL

SEQ ID NO: 465 - protein, 10 aa, synthetic construct
  REGION 1..10: note = Description of sequence: epitope presenting peptide
SEPVLKGVKL

SEQ ID NO: 466 - protein, 9 aa, synthetic construct
  REGION 1..9: note = Description of sequence: epitope presenting peptide
KCYGVSPTK

SEQ ID NO: 467 - protein, 10 aa, synthetic construct
  REGION 1..10: note = Description of sequence: epitope presenting peptide
TEKSNIIRGW

SEQ ID NO: 468 - protein, 14 aa, synthetic construct
  REGION 1..14: note = Description of sequence: epitope presenting peptide
TVYDPLQPELDSFK

SEQ ID NO: 469 - protein, 10 aa, synthetic construct
  REGION 1..10: note = Description of sequence: epitope presenting peptide
TECSNLLLQY

SEQ ID NO: 470 - protein, 9 aa, synthetic construct
  REGION 1..9: note = Description of sequence: epitope presenting peptide
GVYFASTEK

SEQ ID NO: 471 - protein, 12 aa, synthetic construct
  REGION 1..12: note = Description of sequence: epitope presenting peptide
REGVFVSNGTHW

SEQ ID NO: 472 - protein, 9 aa, synthetic construct
  REGION 1..9: note = Description of sequence: epitope presenting peptide
GTHWFVTQR

SEQ ID NO: 473 - protein, 9 aa, synthetic construct
  REGION 1..9: note = Description of sequence: epitope presenting peptide
KVGGNYNYR

SEQ ID NO: 474 - protein, 9 aa, synthetic construct
  REGION 1..9: note = Description of sequence: epitope presenting peptide
KVGGNYNYL

SEQ ID NO: 475 - protein, 9 aa, synthetic construct
  REGION 1..9: note = Description of sequence: epitope presenting peptide
KGFNCYFPL

SEQ ID NO: 476 - protein, 9 aa, synthetic construct
  REGION 1..9: note = Description of sequence: epitope presenting peptide
EGFNCYFPL

SEQ ID NO: 477 - protein, 9 aa, synthetic construct
  REGION 1..9: note = Description of sequence: epitope presenting peptide
DVYYHKNNK

SEQ ID NO: 478 - protein, 8 aa, synthetic construct
  REGION 1..8: note = Description of sequence: epitope presenting peptide
GVYHKNNK

SEQ ID NO: 479 - protein, 9 aa, synthetic construct
  REGION 1..9: note = Description of sequence: epitope presenting peptide
GVYYHKNNK

SEQ ID NO: 480 - protein, 9 aa, synthetic construct
  REGION 1..9: note = Description of sequence: epitope presenting peptide
NSANLAAIK

SEQ ID NO: 481 - protein, 9 aa, synthetic construct
  REGION 1..9: note = Description of sequence: epitope presenting peptide
ASANLAATK

SEQ ID NO: 482 - protein, 9 aa, synthetic construct
  REGION 1..9: note = Description of sequence: epitope presenting peptide
NSANLAAIK

SEQ ID NO: 483 - protein, 9 aa, synthetic construct
  REGION 1..9: note = Description of sequence: epitope presenting peptide
YYHKNNKSW

SEQ ID NO: 484 - protein, 13 aa, synthetic construct
  REGION 1..13: note = Description of sequence: epitope presenting peptide
AYSNNSIAIPINF

SEQ ID NO: 485 - protein, 13 aa, synthetic construct
  REGION 1..13: note = Description of sequence: epitope presenting peptide
AYSNNSIAIPTNF

SEQ ID NO: 486 - protein, 8 aa, synthetic construct
  REGION 1..8: note = Description of sequence: epitope presenting peptide
PINLVRGL

SEQ ID NO: 487 - protein, 9 aa, synthetic construct
  REGION 1..9: note = Description of sequence: epitope presenting peptide
SRRRARSVA

SEQ ID NO: 488 - protein, 9 aa, synthetic construct
  REGION 1..9: note = Description of sequence: epitope presenting peptide
SHRRARSVA

SEQ ID NO: 489 - protein, 9 aa, synthetic construct
  REGION 1..9: note = Description of sequence: epitope presenting peptide
IPINFTISV

SEQ ID NO: 490 - protein, 9 aa, synthetic construct
  REGION 1..9: note = Description of sequence: epitope presenting peptide
IPTNFTISV

SEQ ID NO: 491 - protein, 8 aa, synthetic construct
  REGION 1..8: note = Description of sequence: epitope presenting peptide
NLRTRTQL

SEQ ID NO: 492 - protein, 8 aa, synthetic construct
  REGION 1..8: note = Description of sequence: epitope presenting peptide
NFTNRTQL

SEQ ID NO: 493 - protein, 8 aa, synthetic construct
  REGION 1..8: note = Description of sequence: epitope presenting peptide
NLTTRTQL

SEQ ID NO: 494 - protein, 9 aa, synthetic construct
  REGION 1..9: note = Description of sequence: epitope presenting peptide
  REGION 2..4: note = Amino acid can be absent
  VARIANT 2..4: note = Xaa can be any naturally occurring amino acid
LXXXHRSYL

SEQ ID NO: 495 - protein, 9 aa, synthetic construct
  REGION 1..9: note = Description of sequence: epitope presenting peptide
LLALHRSYL

SEQ ID NO: 496 - protein, 9 aa, synthetic construct
  REGION 1..9: note = Description of sequence: epitope presenting peptide
LPSAYTNSF

SEQ ID NO: 497 - protein, 9 aa, synthetic construct
  REGION 1..9: note = Description of sequence: epitope presenting peptide
LPPAYTNSF

SEQ ID NO: 498 - protein, 8 aa, synthetic construct
  REGION 1..8: note = Description of sequence: epitope presenting peptide
AEYVNNSY

SEQ ID NO: 499 - protein, 8 aa, synthetic construct
  REGION 1..8: note = Description of sequence: epitope presenting peptide
AEHVNNSY

SEQ ID NO: 500 - protein, 9 aa, synthetic construct
  REGION 1..9: note = Description of sequence: cmv epitope presenting peptide
NLVPMVATV

SEQ ID NO: 501 - protein, 20 aa, synthetic construct
  REGION 1..20: note = Description of sequence: (G4S)4 linker sequence
GGGGSGGGGSGGGGSGGGGS

SEQ ID NO: 502 - protein, 10 aa, synthetic construct
  REGION 1..10: note = Description of sequence: mart-1epitope presenting peptide
ELAGIGILTV

SEQ ID NO: 503 - protein, 35 aa, synthetic construct
  REGION 1..35: note = Description of sequence: (G4S)7 linker sequence
GGGGSGGGGSGGGGSGGGGSGGGGSGGGGSGGGGS

SEQ ID NO: 504 - protein, 25 aa, synthetic construct
  REGION 1..25: note = Description of sequence: epitope peptide linker construct with reactive maleimide group.
  MOD_RES 25: note = Mod_Res - where X is a lysine modified on its sidechain amino group with the reactive maleimide
YLQPRTFLLGGGGSGGGGSGGGGSX

SEQ ID NO: 505 - protein, 123 aa, synthetic construct
  REGION 1..123: note = Description of sequence: Construct 839
NLVPMVATVGGGASGGGGSGGGGSIQRTPKIQVYSCHPAENGKSNFLNCYVSGFHPSDIEVDLLKNGERIEKVEHSDLSFSKDWSFYLLYYTEFTPTEKDEYACRVNHVTLSQPKIVKWDRDM

SEQ ID NO: 506 - protein, 813 aa, synthetic construct
  REGION 1..813: note = Description of sequence: Construct 1694
  DISULFID 390..445: note = Disulfide bond
APTSSSTKKTQLQLEALLLDLQMILNGINNYKNPKLTRMLTAKFYMPKKATELKHLQCLEEELKPLEEVLNLAQSKNFHLRPRDLISNINVIVLELKGSETTFMCEYADETATIVEFLNRWITFCQSIISTLTGGGGSGGGGSGGGGSGGGGSAPTSSSTKKTQLQLEALLLDLQMILNGINNYKNPKLTRMLTAKFYMPKKATELKHLQCLEEELKPLEEVLNLAQSKNFHLRPRDLISNINVIVLELKGSETTFMCEYADETATIVEFLNRWITFCQSIISTLTGGGGSGGGGSGGGGSGGGGSGSHSMRYFFTSVSRPGRGEPRFIAVGYVDDTQFVRFDSDAASQRMEPRAPWIEQEGPEYWDGETRKVKAHSQTHRVDLGTLRGCYNQSEAGSHTVQRMYGCDVGSDWRFLRGYHQYAYDGKDYIALKEDLRSWTAADMCAQTTKHKWEAAHVAEQLRAYLEGTCVEWLRRYLENGKETLQRTDAPKTHMTHHAVSDHEATLRCWALSFYPAEITLTWQRDGEDQTQDTELVETRPCGDGTFQKWAAVVVPSGQEQRYTCHVQHEGLPKPLTLRWEAAAGGDKTHTCPPCPAPEAAGGPSVFLFPPKPKDTLMISRTPEVTCVVVDVSHEDPEVKFNWYVDGVEVHNAKTKPREEQYNSTYRVVSVLTVLHQDWLNGKEYKCKVSNKALPAPIEKTISKAKGQPREPQVYTLPPSREEMTKNQVSLTCLVKGFYPSDIAVEWESNGQPENNYKTTPPVLDSDGSFFLYSKLTVDKSRWQQGNVFSCSVMHEALHNHYTQKSLSLSPGK

SEQ ID NO: 507 - protein, 99 aa, synthetic construct
  REGION 1..99: note = Description of sequence: Construct 2686
IQRTPKIQVYSCHPAENGKSNFLNCYVSGFHPSDIEVDLLKNGCRIEKVEHSDLSFSKDWSFYLLYYTEFTPTEKDEYACRVNHVTLSQPKIVKWDRDM

SEQ ID NO: 508 - protein, 925 aa, synthetic construct
  REGION 1..925: note = Description of sequence: Construct 3861
  DISULFID 504..559: note = Disulfide bond
PTSSSTKKTQLQLEALLLDLQMILNGINNYKNPKLTRMLTAKFYMPKKATELKHLQCLEEELKPLEEVLNLAQSKNFHLRPRDLISNINVIVLELKGSETTFMCEYADETATIVEFLNRWITFCQSIISTLTGGGGSGGGGSGGGGSGGGGSAPTSSSTKKTQLQLEALLLDLQMILNGINNYKNPKLTRMLTAKFYMPKKATELKHLQCLEEELKPLEEVLNLAQSKNFHLRPRDLISNINVIVLELKGSETTFMCEYADETATIVEFLNRWITFCQSIISTLTGGGGSGGGGSGGGGSGGGGSIQRTPKIQVYSRHPAENGKSNFLNCYVSGFHPSDIEVDLLKNGCRIEKVEHSDLSFSKDWSFYLLYYTEFTPTEKDEYACRVNHVTLSQPKIVKWDRDMGGGGSGGGGSGGGGSGSHSMRYFFTSVSRPGRGEPRFIAVGYVDDTQFVRFDSDAASQRMEPRAPWIEQEGPEYWDGETRKVKAHSQTHRVDLGTLRGCYNQSEAGSHTVQRMYGCDVGSDWRFLRGYHQYAYDGKDYIALKEDLRSWTAADMCAQTTKHKWEAAHVAEQLRAYLEGTCVEWLRRYLENGKETLQRTDAPKTHMTHHAVSDHEATLRCWALSFYPAEITLTWQRDGEDQTQDTELVETRPAGDGTFQKWAAVVVPSGQEQRYTCHVQHEGLPKPLTLRWEAAAGGDKTHTCPPCPAPEAAGGPSVFLFPPKPKDTLMISRTPEVTCVVVDVSHEDPEVKFNWYVDGVEVHNAKTKPREEQYNSTYRVVSVLTVLHQDWLNGKEYKCKVSNKALPAPIEKTISKAKGQPREPQVYTLPPSREEMTKNQVSLTCLVKGFYPSDIAVEWESNGQPENNYKTTPPVLDSDGSFFLYSKLTVDKSRWQQGNVFSCSVMHEALHNHYTQKSLSLSPG

SEQ ID NO: 509 - protein, 772 aa, synthetic construct
  REGION 1..772: note = Description of sequence: Construct 3984
  DISULFID 351..406: note = Disulfide bond
APTSSSTKKTQLQLEALLLDLQMILNGINNYKNPKLTRMLTAKFYMPKKATELKHLQCLEEELKPLEEVLNLAQSKNFHLRPRDLISNINVIVLELKGSETTFMCEYADETATIVEFLNRWITFCQSIISTLTGGGGSGGGGSGGGGSGGGGSIQRTPKIQVYSRHPAENGKSNFLNCYVSGFHPSDIEVDLLKNGCRIEKVEHSDLSFSKDWSFYLLYYTEFTPTEKDEYACRVNHVTLSQPKIVKWDRDMGGGGSGGGGSGGGGSGSHSMRYFFTSVSRPGRGEPRFIAVGYVDDTQFVRFDSDAASQRMEPRAPWIEQEGPEYWDGETRKVKAHSQTHRVDLGTLRGCYNQSEAGSHTVQRMYGCDVGSDWRFLRGYHQYAYDGKDYIALKEDLRSWTAADMCAQTTKHKWEAAHVAEQLRAYLEGTCVEWLRRYLENGKETLQRTDAPKTHMTHHAVSDHEATLRCWALSFYPAEITLTWQRDGEDQTQDTELVETRPAGDGTFQKWAAVVVPSGQEQRYTCHVQHEGLPKPLTLRWEAAAGGDKTHTCPPCPAPEAAGGPSVFLFPPKPKDTLMISRTPEVTCVVVDVSHEDPEVKFNWYVDGVEVHNAKTKPREEQYNSTYRVVSVLTVLHQDWLNGKEYKCKVSNKALPAPIEKTISKAKGQPREPQVYTLPPSREEMTKNQVSLTCLVKGFYPSDIAVEWESNGQPENNYKTTPPVLDSDGSFFLYSKLTVDKSRWQQGNVFSCSVMHEALHNHYTQKSLSLSP

SEQ ID NO: 510 - protein, 926 aa, synthetic construct
  REGION 1..926: note = Description of sequence: Construct 3985
  DISULFID 504..559: note = Disulfide bond
APTSSSTKKTQLQLEALLLDLQMILNGINNYKNPKLTRMLTAKFYMPKKATELKHLQCLEEELKPLEEVLNLAQSKNFHLRPRDLISNINVIVLELKGSETTFMCEYADETATIVEFLNRWITFCQSIISTLTGGGGSGGGGSGGGGSGGGGSAPTSSSTKKTQLQLEALLLDLQMILNGINNYKNPKLTRMLTAKFYMPKKATELKHLQCLEEELKPLEEVLNLAQSKNFHLRPRDLISNINVIVLELKGSETTFMCEYADETATIVEFLNRWITFCQSIISTLTGGGGSGLGGSGGGGSGGGGSIQRTPKIQVYSRHPAENGKSNFLNCYVSGFHPSDIEVDLLKNGCRIEKVEHSDLSFSKDWSFYLLYYTEFTPTEKDEYACRVNHVTLSQPKIVKWDRDMGGGGSGGGGSGGGGSGSHSMRYFFTSVSRPGRGEPRFIAVGYVDDTQFVRFDSDAASQRMEPRAPWIEQEGPEYWDGETRKVKAHSQTHRVDLGTLRGCYNQSEAGSHTVQRMYGCDVGSDWRFLRGYHQYAYDGKDYIALKEDLRSWTAADMCAQTTKHKWEAAHVAEQLRAYLEGTCVEWLRRYLENGKETLQRTDAPKTHMTHHAVSDHEATLRCWALSFYPAEITLTWQRDGEDQTQDTELVETRPAGDGTFQKWAAVVVPSGQEQRYTCHVQHEGLPKPLTLRWEAAAGGDKTHTCPPCPAPEAAGGPSVFLFPPKPKDTLMISRTPEVTCVVVDVSHEDPEVKFNWYVDGVEVHNAKTKPREEQYNSTYRVVSVLTVLHQDWLNGKEYKCKVSNKALPAPIEKTISKAKGQPREPQVYTLPPSREEMTKNQVSLTCLVKGFYPSDIAVEWESNGQPENNYKTTPPVLDSDGSFFLYSKLTVDKSRWQQGNVFSCSVMHEALHNHYTQKSLSLSPG

SEQ ID NO: 511 - protein, 926 aa, synthetic construct
  REGION 1..926: note = Description of sequence: Construct 3986
  DISULFID 504..559: note = Disulfide bond
APTSSSTKKTQLQLEALLLDLQMILNGINNYKNPKLTRMLTAKFYMPKKATELKHLQCLEEELKPLEEVLNLAQSKNFHLRPRDLISNINVIVLELKGSETTFMCEYADETATIVEFLNRWITFCQSIISTLTGGGGSGGGGSGGGGSGGGGSAPTSSSTKKTQLQLEALLLDLQMILNGINNYKNPKLTRMLTAKFYMPKKATELKHLQCLEEELKPLEEVLNLAQSKNFHLRPRDLISNINVIVLELKGSETTFMCEYADETATIVEFLNRWITFCQSIISTLTGGGGSGGGGSGLGGSGGGGSIQRTPKIQVYSRHPAENGKSNFLNCYVSGFHPSDIEVDLLKNGCRIEKVEHSDLSFSKDWSFYLLYYTEFTPTEKDEYACRVNHVTLSQPKIVKWDRDMGGGGSGGGGSGGGGSGSHSMRYFFTSVSRPGRGEPRFIAVGYVDDTQFVRFDSDAASQRMEPRAPWIEQEGPEYWDGETRKVKAHSQTHRVDLGTLRGCYNQSEAGSHTVQRMYGCDVGSDWRFLRGYHQYAYDGKDYIALKEDLRSWTAADMCAQTTKHKWEAAHVAEQLRAYLEGTCVEWLRRYLENGKETLQRTDAPKTHMTHHAVSDHEATLRCWALSFYPAEITLTWQRDGEDQTQDTELVETRPAGDGTFQKWAAVVVPSGQEQRYTCHVQHEGLPKPLTLRWEAAAGGDKTHTCPPCPAPEAAGGPSVFLFPPKPKDTLMISRTPEVTCVVVDVSHEDPEVKFNWYVDGVEVHNAKTKPREEQYNSTYRVVSVLTVLHQDWLNGKEYKCKVSNKALPAPIEKTISKAKGQPREPQVYTLPPSREEMTKNQVSLTCLVKGFYPSDIAVEWESNGQPENNYKTTPPVLDSDGSFFLYSKLTVDKSRWQQGNVFSCSVMHEALHNHYTQKSLSLSPG

SEQ ID NO: 512 - protein, 926 aa, synthetic construct
  REGION 1..926: note = Description of sequence: Construct 3987
  DISULFID 504..559: note = Disulfide bond
APTSSSTKKTQLQLEALLLDLQMILNGINNYKNPKLTRMLTAKFYMPKKATELKHLQCLEEELKPLEEVLNLAQSKNFHLRPRDLISNINVIVLELKGSETTFMCEYADETATIVEFLNRWITFCQSIISTLTGGGGSGGGGSGGGGSGGGGSAPTSSSTKKTQLQLEALLLDLQMILNGINNYKNPKLTRMLTAKFYMPKKATELKHLQCLEEELKPLEEVLNLAQSKNFHLRPRDLISNINVIVLELKGSETTFMCEYADETATIVEFLNRWITFCQSIISTLTGGGGSGGGGSGGGGSGLGGSIQRTPKIQVYSRHPAENGKSNFLNCYVSGFHPSDIEVDLLKNGCRIEKVEHSDLSFSKDWSFYLLYYTEFTPTEKDEYACRVNHVTLSQPKIVKWDRDMGGGGSGGGGSGGGGSGSHSMRYFFTSVSRPGRGEPRFIAVGYVDDTQFVRFDSDAASQRMEPRAPWIEQEGPEYWDGETRKVKAHSQTHRVDLGTLRGCYNQSEAGSHTVQRMYGCDVGSDWRFLRGYHQYAYDGKDYIALKEDLRSWTAADMCAQTTKHKWEAAHVAEQLRAYLEGTCVEWLRRYLENGKETLQRTDAPKTHMTHHAVSDHEATLRCWALSFYPAEITLTWQRDGEDQTQDTELVETRPAGDGTFQKWAAVVVPSGQEQRYTCHVQHEGLPKPLTLRWEAAAGGDKTHTCPPCPAPEAAGGPSVFLFPPKPKDTLMISRTPEVTCVVVDVSHEDPEVKFNWYVDGVEVHNAKTKPREEQYNSTYRVVSVLTVLHQDWLNGKEYKCKVSNKALPAPIEKTISKAKGQPREPQVYTLPPSREEMTKNQVSLTCLVKGFYPSDIAVEWESNGQPENNYKTTPPVLDSDGSFFLYSKLTVDKSRWQQGNVFSCSVMHEALHNHYTQKSLSLSPG

SEQ ID NO: 513 - protein, 926 aa, synthetic construct
  REGION 1..926: note = Description of sequence: Construct 3988
  DISULFID 504..559: note = Disulfide bond
APTSSSTKKTQLQLEALLLDLQMILNGINNYKNPKLTRMLTAKFYMPKKATELKHLQCLEEELKPLEEVLNLAQSKNFHLRPRDLISNINVIVLELKGSETTFMCEYADETATIVEFLNRWITFCQSIISTLTGGGGSGGGGSGGGGSGGGGSAPTSSSTKKTQLQLEALLLDLQMILNGINNYKNPKLTRMLTAKFYMPKKATELKHLQCLEEELKPLEEVLNLAQSKNFHLRPRDLISNINVIVLELKGSETTFMCEYADETATIVEFLNRWITFCQSIISTLTGGGGSGMGGSGGGGSGGGGSIQRTPKIQVYSRHPAENGKSNFLNCYVSGFHPSDIEVDLLKNGCRIEKVEHSDLSFSKDWSFYLLYYTEFTPTEKDEYACRVNHVTLSQPKIVKWDRDMGGGGSGGGGSGGGGSGSHSMRYFFTSVSRPGRGEPRFIAVGYVDDTQFVRFDSDAASQRMEPRAPWIEQEGPEYWDGETRKVKAHSQTHRVDLGTLRGCYNQSEAGSHTVQRMYGCDVGSDWRFLRGYHQYAYDGKDYIALKEDLRSWTAADMCAQTTKHKWEAAHVAEQLRAYLEGTCVEWLRRYLENGKETLQRTDAPKTHMTHHAVSDHEATLRCWALSFYPAEITLTWQRDGEDQTQDTELVETRPAGDGTFQKWAAVVVPSGQEQRYTCHVQHEGLPKPLTLRWEAAAGGDKTHTCPPCPAPEAAGGPSVFLFPPKPKDTLMISRTPEVTCVVVDVSHEDPEVKFNWYVDGVEVHNAKTKPREEQYNSTYRVVSVLTVLHQDWLNGKEYKCKVSNKALPAPIEKTISKAKGQPREPQVYTLPPSREEMTKNQVSLTCLVKGFYPSDIAVEWESNGQPENNYKTTPPVLDSDGSFFLYSKLTVDKSRWQQGNVFSCSVMHEALHNHYTQKSLSLSPG

SEQ ID NO: 514 - protein, 926 aa, synthetic construct
  REGION 1..926: note = Description of sequence: Construct 3989
  DISULFID 504..559: note = Disulfide bond
APTSSSTKKTQLQLEALLLDLQMILNGINNYKNPKLTRMLTAKFYMPKKATELKHLQCLEEELKPLEEVLNLAQSKNFHLRPRDLISNINVIVLELKGSETTFMCEYADETATIVEFLNRWITFCQSIISTLTGGGGSGGGGSGGGGSGGGGSAPTSSSTKKTQLQLEALLLDLQMILNGINNYKNPKLTRMLTAKFYMPKKATELKHLQCLEEELKPLEEVLNLAQSKNFHLRPRDLISNINVIVLELKGSETTFMCEYADETATIVEFLNRWITFCQSIISTLTGGGGSGGGMSGGGGSGGGGSIQRTPKIQVYSRHPAENGKSNFLNCYVSGFHPSDIEVDLLKNGCRIEKVEHSDLSFSKDWSFYLLYYTEFTPTEKDEYACRVNHVTLSQPKIVKWDRDMGGGGSGGGGSGGGGSGSHSMRYFFTSVSRPGRGEPRFIAVGYVDDTQFVRFDSDAASQRMEPRAPWIEQEGPEYWDGETRKVKAHSQTHRVDLGTLRGCYNQSEAGSHTVQRMYGCDVGSDWRFLRGYHQYAYDGKDYIALKEDLRSWTAADMCAQTTKHKWEAAHVAEQLRAYLEGTCVEWLRRYLENGKETLQRTDAPKTHMTHHAVSDHEATLRCWALSFYPAEITLTWQRDGEDQTQDTELVETRPAGDGTFQKWAAVVVPSGQEQRYTCHVQHEGLPKPLTLRWEAAAGGDKTHTCPPCPAPEAAGGPSVFLFPPKPKDTLMISRTPEVTCVVVDVSHEDPEVKFNWYVDGVEVHNAKTKPREEQYNSTYRVVSVLTVLHQDWLNGKEYKCKVSNKALPAPIEKTISKAKGQPREPQVYTLPPSREEMTKNQVSLTCLVKGFYPSDIAVEWESNGQPENNYKTTPPVLDSDGSFFLYSKLTVDKSRWQQGNVFSCSVMHEALHNHYTQKSLSLSPG

SEQ ID NO: 515 - protein, 926 aa, synthetic construct
  REGION 1..926: note = Description of sequence: Construct 3990
  DISULFID 504..559: note = Disulfide bond
APTSSSTKKTQLQLEALLLDLQMILNGINNYKNPKLTRMLTAKFYMPKKATELKHLQCLEEELKPLEEVLNLAQSKNFHLRPRDLISNINVIVLELKGSETTFMCEYADETATIVEFLNRWITFCQSIISTLTGGGGSGGGGSGGGGSGGGGSAPTSSSTKKTQLQLEALLLDLQMILNGINNYKNPKLTRMLTAKFYMPKKATELKHLQCLEEELKPLEEVLNLAQSKNFHLRPRDLISNINVIVLELKGSETTFMCEYADETATIVEFLNRWITFCQSIISTLTGGGGSGGGGSMGGGSGGGGSIQRTPKIQVYSRHPAENGKSNFLNCYVSGFHPSDIEVDLLKNGCRIEKVEHSDLSFSKDWSFYLLYYTEFTPTEKDEYACRVNHVTLSQPKIVKWDRDMGGGGSGGGGSGGGGSGSHSMRYFFTSVSRPGRGEPRFIAVGYVDDTQFVRFDSDAASQRMEPRAPWIEQEGPEYWDGETRKVKAHSQTHRVDLGTLRGCYNQSEAGSHTVQRMYGCDVGSDWRFLRGYHQYAYDGKDYIALKEDLRSWTAADMCAQTTKHKWEAAHVAEQLRAYLEGTCVEWLRRYLENGKETLQRTDAPKTHMTHHAVSDHEATLRCWALSFYPAEITLTWQRDGEDQTQDTELVETRPAGDGTFQKWAAVVVPSGQEQRYTCHVQHEGLPKPLTLRWEAAAGGDKTHTCPPCPAPEAAGGPSVFLFPPKPKDTLMISRTPEVTCVVVDVSHEDPEVKFNWYVDGVEVHNAKTKPREEQYNSTYRVVSVLTVLHQDWLNGKEYKCKVSNKALPAPIEKTISKAKGQPREPQVYTLPPSREEMTKNQVSLTCLVKGFYPSDIAVEWESNGQPENNYKTTPPVLDSDGSFFLYSKLTVDKSRWQQGNVFSCSVMHEALHNHYTQKSLSLSPG

SEQ ID NO: 516 - protein, 926 aa, synthetic construct
  REGION 1..926: note = Description of sequence: Construct 3991
  DISULFID 504..559: note = Disulfide bond
APTSSSTKKTQLQLEALLLDLQMILNGINNYKNPKLTRMLTAKFYMPKKATELKHLQCLEEELKPLEEVLNLAQSKNFHLRPRDLISNINVIVLELKGSETTFMCEYADETATIVEFLNRWITFCQSIISTLTGGGGSGGGGSGGGGSGGGGSAPTSSSTKKTQLQLEALLLDLQMILNGINNYKNPKLTRMLTAKFYMPKKATELKHLQCLEEELKPLEEVLNLAQSKNFHLRPRDLISNINVIVLELKGSETTFMCEYADETATIVEFLNRWITFCQSIISTLTGGGGSGGGGSGMGGSGGGGSIQRTPKIQVYSRHPAENGKSNFLNCYVSGFHPSDIEVDLLKNGCRIEKVEHSDLSFSKDWSFYLLYYTEFTPTEKDEYACRVNHVTLSQPKIVKWDRDMGGGGSGGGGSGGGGSGSHSMRYFFTSVSRPGRGEPRFIAVGYVDDTQFVRFDSDAASQRMEPRAPWIEQEGPEYWDGETRKVKAHSQTHRVDLGTLRGCYNQSEAGSHTVQRMYGCDVGSDWRFLRGYHQYAYDGKDYIALKEDLRSWTAADMCAQTTKHKWEAAHVAEQLRAYLEGTCVEWLRRYLENGKETLQRTDAPKTHMTHHAVSDHEATLRCWALSFYPAEITLTWQRDGEDQTQDTELVETRPAGDGTFQKWAAVVVPSGQEQRYTCHVQHEGLPKPLTLRWEAAAGGDKTHTCPPCPAPEAAGGPSVFLFPPKPKDTLMISRTPEVTCVVVDVSHEDPEVKFNWYVDGVEVHNAKTKPREEQYNSTYRVVSVLTVLHQDWLNGKEYKCKVSNKALPAPIEKTISKAKGQPREPQVYTLPPSREEMTKNQVSLTCLVKGFYPSDIAVEWESNGQPENNYKTTPPVLDSDGSFFLYSKLTVDKSRWQQGNVFSCSVMHEALHNHYTQKSLSLSPG

SEQ ID NO: 517 - protein, 926 aa, synthetic construct
  REGION 1..926: note = Description of sequence: Construct 3992
  DISULFID 504..559: note = Disulfide bond
APTSSSTKKTQLQLEALLLDLQMILNGINNYKNPKLTRMLTAKFYMPKKATELKHLQCLEEELKPLEEVLNLAQSKNFHLRPRDLISNINVIVLELKGSETTFMCEYADETATIVEFLNRWITFCQSIISTLTGGGGSGGGGSGGGGSGGGGSAPTSSSTKKTQLQLEALLLDLQMILNGINNYKNPKLTRMLTAKFYMPKKATELKHLQCLEEELKPLEEVLNLAQSKNFHLRPRDLISNINVIVLELKGSETTFMCEYADETATIVEFLNRWITFCQSIISTLTGGGGSGGGGSGGGGMGGGGSIQRTPKIQVYSRHPAENGKSNFLNCYVSGFHPSDIEVDLLKNGCRIEKVEHSDLSFSKDWSFYLLYYTEFTPTEKDEYACRVNHVTLSQPKIVKWDRDMGGGGSGGGGSGGGGSGSHSMRYFFTSVSRPGRGEPRFIAVGYVDDTQFVRFDSDAASQRMEPRAPWIEQEGPEYWDGETRKVKAHSQTHRVDLGTLRGCYNQSEAGSHTVQRMYGCDVGSDWRFLRGYHQYAYDGKDYIALKEDLRSWTAADMCAQTTKHKWEAAHVAEQLRAYLEGTCVEWLRRYLENGKETLQRTDAPKTHMTHHAVSDHEATLRCWALSFYPAEITLTWQRDGEDQTQDTELVETRPAGDGTFQKWAAVVVPSGQEQRYTCHVQHEGLPKPLTLRWEAAAGGDKTHTCPPCPAPEAAGGPSVFLFPPKPKDTLMISRTPEVTCVVVDVSHEDPEVKFNWYVDGVEVHNAKTKPREEQYNSTYRVVSVLTVLHQDWLNGKEYKCKVSNKALPAPIEKTISKAKGQPREPQVYTLPPSREEMTKNQVSLTCLVKGFYPSDIAVEWESNGQPENNYKTTPPVLDSDGSFFLYSKLTVDKSRWQQGNVFSCSVMHEALHNHYTQKSLSLSPG

SEQ ID NO: 518 - protein, 116 aa, synthetic construct
  REGION 1..116: note = Description of sequence: Construct 3993
GMGGGGSGGGGSGGGGSIQRTPKIQVYSCHPAENGKSNFLNCYVSGFHPSDIEVDLLKNGCRIEKVEHSDLSFSKDWSFYLLYYTEFTPTEKDEYACRVNHVTLSQPKIVKWDRDM

SEQ ID NO: 519 - protein, 114 aa, synthetic construct
  REGION 1..114: note = Description of sequence: Construct 3994
GMGGSGGGGSGGGGSIQRTPKIQVYSCHPAENGKSNFLNCYVSGFHPSDIEVDLLKNGCRIEKVEHSDLSFSKDWSFYLLYYTEFTPTEKDEYACRVNHVTLSQPKIVKWDRDM

SEQ ID NO: 520 - protein, 112 aa, synthetic construct
  REGION 1..112: note = Description of sequence: Construct 3995
GMSGGGGSGGGGSIQRTPKIQVYSCHPAENGKSNFLNCYVSGFHPSDIEVDLLKNGCRIEKVEHSDLSFSKDWSFYLLYYTEFTPTEKDEYACRVNHVTLSQPKIVKWDRDM

SEQ ID NO: 521 - protein, 110 aa, synthetic construct
  REGION 1..110: note = Description of sequence: Construct 3996
GMGGGSGGGGSIQRTPKIQVYSCHPAENGKSNFLNCYVSGFHPSDIEVDLLKNGCRIEKVEHSDLSFSKDWSFYLLYYTEFTPTEKDEYACRVNHVTLSQPKIVKWDRDM

SEQ ID NO: 522 - protein, 108 aa, synthetic construct
  REGION 1..108: note = Description of sequence: Construct 3997
GMGSGGGGSIQRTPKIQVYSCHPAENGKSNFLNCYVSGFHPSDIEVDLLKNGCRIEKVEHSDLSFSKDWSFYLLYYTEFTPTEKDEYACRVNHVTLSQPKIVKWDRDM

SEQ ID NO: 523 - protein, 106 aa, synthetic construct
  REGION 1..106: note = Description of sequence: Construct 3998
GMGGGGSIQRTPKIQVYSCHPAENGKSNFLNCYVSGFHPSDIEVDLLKNGCRIEKVEHSDLSFSKDWSFYLLYYTEFTPTEKDEYACRVNHVTLSQPKIVKWDRDM

SEQ ID NO: 524 - protein, 926 aa, synthetic construct
  REGION 1..926: note = Description of sequence: Construct 3999
  DISULFID 504..559: note = Disulfide bond
APTSSSTKKTQLQLEALLLDLQMILNGINNYKNPKLTRMLTAKFYMPKKATELKHLQCLEEELKPLEEVLNLAQSKNFHLRPRDLISNINVIVLELKGSETTFMCEYADETATIVEFLNRWITFCQSIISTLTGGGGSGGGGSGGGGSGGGGSAPTSSSTKKTQLQLEALLLDLQMILNGINNYKNPKLTRMLTAKFYMPKKATELKHLQCLEEELKPLEEVLNLAQSKNFHLRPRDLISNINVIVLELKGSETTFMCEYADETATIVEFLNRWITFCQSIISTLTGGGGSGGGGSGGGGSGGGGSIQRTPKIQVYSRHPAENGKSNFLNCYVSGFHPSDIEVDLLKNGCRIEKVEHSDLSFSKDWSFYLLYYTEFTPTEKDEYACRVNHVTLSQPKIVKWDRDMGGGGSGGGGSGGGGSGSHSMRYFFTSVSRPGRGEPRFIAVGYVDDTQFVRFDSDAASQRMEPRAPWIEQEGPEYWDGETRKVKAHSQTHRVDLGTLRGCYNQSEAGSHTVQRMYGCDVGSDWRFLRGYHQYAYDGKDYIALKEDLRSWTAADMCAQTLKHKWEAAHVAEQLRAYLEGTCVEWLRRYLENGKETLQRTDAPKTHMTHHAVSDHEATLRCWALSFYPAEITLTWQRDGEDQTQDTELVETRPAGDGTFQKWAAVVVPSGQEQRYTCHVQHEGLPKPLTLRWEAAAGGDKTHTCPPCPAPEAAGGPSVFLFPPKPKDTLMISRTPEVTCVVVDVSHEDPEVKFNWYVDGVEVHNAKTKPREEQYNSTYRVVSVLTVLHQDWLNGKEYKCKVSNKALPAPIEKTISKAKGQPREPQVYTLPPSREEMTKNQVSLTCLVKGFYPSDIAVEWESNGQPENNYKTTPPVLDSDGSFFLYSKLTVDKSRWQQGNVFSCSVMHEALHNHYTQKSLSLSPG

SEQ ID NO: 525 - protein, 926 aa, synthetic construct
  REGION 1..926: note = Description of sequence: Construct 4000
  DISULFID 504..559: note = Disulfide bond
APTSSSTKKTQLQLEALLLDLQMILNGINNYKNPKLTRMLTAKFYMPKKATELKHLQCLEEELKPLEEVLNLAQSKNFHLRPRDLISNINVIVLELKGSETTFMCEYADETATIVEFLNRWITFCQSIISTLTGGGGSGGGGSGGGGSGGGGSAPTSSSTKKTQLQLEALLLDLQMILNGINNYKNPKLTRMLTAKFYMPKKATELKHLQCLEEELKPLEEVLNLAQSKNFHLRPRDLISNINVIVLELKGSETTFMCEYADETATIVEFLNRWITFCQSIISTLTGGGGSGGGGSGGGGSGGGGSIQRTPKIQVYSRHPAENGKSNFLNCYVSGFHPSDIEVDLLKNGCRIEKVEHSDLSFSKDWSFYLLYYTEFTPTEKDEYACRVNHVTLSQPKIVKWDRDMGGGGSGGGGSGGGGSGSHSMRYFFTSVSRPGRGEPRFIAVGYVDDTQFVRFDSDAASQRMEPRAPWIEQEGPEYWDGETRKVKAHSQTHRVDLGTLRGCYNQSEAGSHTVQRMYGCDVGSDWRFLRGYHQYAYDGKDYIALKEDLRSWTAADMCAQTMKHKWEAAHVAEQLRAYLEGTCVEWLRRYLENGKETLQRTDAPKTHMTHHAVSDHEATLRCWALSFYPAEITLTWQRDGEDQTQDTELVETRPAGDGTFQKWAAVVVPSGQEQRYTCHVQHEGLPKPLTLRWEAAAGGDKTHTCPPCPAPEAAGGPSVFLFPPKPKDTLMISRTPEVTCVVVDVSHEDPEVKFNWYVDGVEVHNAKTKPREEQYNSTYRVVSVLTVLHQDWLNGKEYKCKVSNKALPAPIEKTISKAKGQPREPQVYTLPPSREEMTKNQVSLTCLVKGFYPSDIAVEWESNGQPENNYKTTPPVLDSDGSFFLYSKLTVDKSRWQQGNVFSCSVMHEALHNHYTQKSLSLSPG

SEQ ID NO: 526 - protein, 926 aa, synthetic construct
  REGION 1..926: note = Description of sequence: Construct 4001
  DISULFID 504..559: note = Disulfide bond
APTSSSTKKTQLQLEALLLDLQMILNGINNYKNPKLTRMLTAKFYMPKKATELKHLQCLEEELKPLEEVLNLAQSKNFHLRPRDLISNINVIVLELKGSETTFMCEYADETATIVEFLNRWITFCQSIISTLTGGGGSGGGGSGGGGSGGGGSAPTSSSTKKTQLQLEALLLDLQMILNGINNYKNPKLTRMLTAKFYMPKKATELKHLQCLEEELKPLEEVLNLAQSKNFHLRPRDLISNINVIVLELKGSETTFMCEYADETATIVEFLNRWITFCQSIISTLTGGGGSGGGGSGGGGSGGGGSIQRTPKIQVYSRHPAENGKSNFLNCYVSGFHPSDIEVDLLKNGCRIEKVEHSDLSFSKDWSFYLLYYTEFTPTEKDEYACRVNHVTLSQPKIVKWDRDMGGGGSGGGGSGGGGSGSHSMRYFFTSVSRPGRGEPRFIAVGYVDDTQFVRFDSDAASQRMEPRAPWIEQEGPEYWDGETRKVKAHSQTHRVDLGTMRGCYNQSEAGSHTVQRMYGCDVGSDWRFLRGYHQYAYDGKDYIALKEDLRSWTAADMCAQTTKHKWEAAHVAEQLRAYLEGTCVEWLRRYLENGKETLQRTDAPKTHMTHHAVSDHEATLRCWALSFYPAEITLTWQRDGEDQTQDTELVETRPAGDGTFQKWAAVVVPSGQEQRYTCHVQHEGLPKPLTLRWEAAAGGDKTHTCPPCPAPEAAGGPSVFLFPPKPKDTLMISRTPEVTCVVVDVSHEDPEVKFNWYVDGVEVHNAKTKPREEQYNSTYRVVSVLTVLHQDWLNGKEYKCKVSNKALPAPIEKTISKAKGQPREPQVYTLPPSREEMTKNQVSLTCLVKGFYPSDIAVEWESNGQPENNYKTTPPVLDSDGSFFLYSKLTVDKSRWQQGNVFSCSVMHEALHNHYTQKSLSLSPG

SEQ ID NO: 527 - protein, 128 aa, synthetic construct
  REGION 1..128: note = Description of sequence: Construct 4002
NLVPMVATVGGGASGGGGSGGGGSIQRTPKIQVYSCHPAENGKSNFLNCYVSGFHPSDIEVDLLKNGCRIEKVEHSDLSFSKDWSFYLLYYTEFTPTEKDEYACRVNHVTLSQPKIVKWDRDMSEQID

SEQ ID NO: 528 - protein, 143 aa, synthetic construct
  REGION 1..143: note = Description of sequence: Construct 4003
NLVPMVATVGGGASGGGGSHVVPYGLGSPRSKRALENLLGGGGSIQRTPKIQVYSCHPAENGKSNFLNCYVSGFHPSDIEVDLLKNGCRIEKVEHSDLSFSKDWSFYLLYYTEFTPTEKDEYACRVNHVTLSQPKIVKWDRDM

SEQ ID NO: 529 - protein, 931 aa, synthetic construct
  REGION 1..931: note = Description of sequence: Construct 4004
  DISULFID 509..564: note = Disulfide bond
APTSSSTKKTQLQLEALLLDLQMILNGINNYKNPKLTRMLTAKFYMPKKATELKHLQCLEEELKPLEEVLNLAQSKNFHLRPRDLISNINVIVLELKGSETTFMCEYADETATIVEFLNRWITFCQSIISTLTGGGGSGGGGSGGGGSGGGGSAPTSSSTKKTQLQLEALLLDLQMILNGINNYKNPKLTRMLTAKFYMPKKATELKHLQCLEEELKPLEEVLNLAQSKNFHLRPRDLISNINVIVLELKGSETTFMCEYADETATIVEFLNRWITFCQSIISTLTGGGGSGGGGSGGGGSGGGGSGGGGSIQRTPKIQVYSRHPAENGKSNFLNCYVSGFHPSDIEVDLLKNGCRIEKVEHSDLSFSKDWSFYLLYYTEFTPTEKDEYACRVNHVTLSQPKIVKWDRDMGGGGSGGGGSGGGGSGSHSMRYFFTSVSRPGRGEPRFIAVGYVDDTQFVRFDSDAASQRMEPRAPWIEQEGPEYWDGETRKVKAHSQTHRVDLGTLRGCYNQSEAGSHTVQRMYGCDVGSDWRFLRGYHQYAYDGKDYIALKEDLRSWTAADMCAQTTKHKWEAAHVAEQLRAYLEGTCVEWLRRYLENGKETLQRTDAPKTHMTHHAVSDHEATLRCWALSFYPAEITLTWQRDGEDQTQDTELVETRPAGDGTFQKWAAVVVPSGQEQRYTCHVQHEGLPKPLTLRWEAAAGGDKTHTCPPCPAPEAAGGPSVFLFPPKPKDTLMISRTPEVTCVVVDVSHEDPEVKFNWYVDGVEVHNAKTKPREEQYNSTYRVVSVLTVLHQDWLNGKEYKCKVSNKALPAPIEKTISKAKGQPREPQVYTLPPSREEMTKNQVSLTCLVKGFYPSDIAVEWESNGQPENNYKTTPPVLDSDGSFFLYSKLTVDKSRWQQGNVFSCSVMHEALHNHYTQKSLSLSPG

SEQ ID NO: 530 - protein, 936 aa, synthetic construct
  REGION 1..936: note = Description of sequence: Construct 4005
  DISULFID 514..569: note = Disulfide bond
APTSSSTKKTQLQLEALLLDLQMILNGINNYKNPKLTRMLTAKFYMPKKATELKHLQCLEEELKPLEEVLNLAQSKNFHLRPRDLISNINVIVLELKGSETTFMCEYADETATIVEFLNRWITFCQSIISTLTGGGGSGGGGSGGGGSGGGGSAPTSSSTKKTQLQLEALLLDLQMILNGINNYKNPKLTRMLTAKFYMPKKATELKHLQCLEEELKPLEEVLNLAQSKNFHLRPRDLISNINVIVLELKGSETTFMCEYADETATIVEFLNRWITFCQSIISTLTGGGGSGGGGSGGGGSGGGGSGGGGSGGGGSIQRTPKIQVYSRHPAENGKSNFLNCYVSGFHPSDIEVDLLKNGCRIEKVEHSDLSFSKDWSFYLLYYTEFTPTEKDEYACRVNHVTLSQPKIVKWDRDMGGGGSGGGGSGGGGSGSHSMRYFFTSVSRPGRGEPRFIAVGYVDDTQFVRFDSDAASQRMEPRAPWIEQEGPEYWDGETRKVKAHSQTHRVDLGTLRGCYNQSEAGSHTVQRMYGCDVGSDWRFLRGYHQYAYDGKDYIALKEDLRSWTAADMCAQTTKHKWEAAHVAEQLRAYLEGTCVEWLRRYLENGKETLQRTDAPKTHMTHHAVSDHEATLRCWALSFYPAEITLTWQRDGEDQTQDTELVETRPAGDGTFQKWAAVVVPSGQEQRYTCHVQHEGLPKPLTLRWEAAAGGDKTHTCPPCPAPEAAGGPSVFLFPPKPKDTLMISRTPEVTCVVVDVSHEDPEVKFNWYVDGVEVHNAKTKPREEQYNSTYRVVSVLTVLHQDWLNGKEYKCKVSNKALPAPIEKTISKAKGQPREPQVYTLPPSREEMTKNQVSLTCLVKGFYPSDIAVEWESNGQPENNYKTTPPVLDSDGSFFLYSKLTVDKSRWQQGNVFSCSVMHEALHNHYTQKSLSLSPG

SEQ ID NO: 531 - protein, 921 aa, synthetic construct
  REGION 1..921: note = Description of sequence: Construct 4006
  DISULFID 499..554: note = Disulfide bond
APTSSSTKKTQLQLEALLLDLQMILNGINNYKNPKLTRMLTAKFYMPKKATELKHLQCLEEELKPLEEVLNLAQSKNFHLRPRDLISNINVIVLELKGSETTFMCEYADETATIVEFLNRWITFCQSIISTLTGGGGSGGGGSGGGGSGGGGSAPTSSSTKKTQLQLEALLLDLQMILNGINNYKNPKLTRMLTAKFYMPKKATELKHLQCLEEELKPLEEVLNLAQSKNFHLRPRDLISNINVIVLELKGSETTFMCEYADETATIVEFLNRWITFCQSIISTLTGGGGSGGGGSGGGGSGGGGSIQRTPKIQVYSRHPAENGKSNFLNCYVSGFHPSDIEVDLLKNGCRIEKVEHSDLSFSKDWSFYLLYYTEFTPTEKDEYACRVNHVTLSQPKIVKWDRDMGGGGSGGGGSGSHSMRYFFTSVSRPGRGEPRFIAVGYVDDTQFVRFDSDAASQRMEPRAPWIEQEGPEYWDGETRKVKAHSQTHRVDLGTLRGCYNQSEAGSHTVQRMYGCDVGSDWRFLRGYHQYAYDGKDYIALKEDLRSWTAADMCAQTTKHKWEAAHVAEQLRAYLEGTCVEWLRRYLENGKETLQRTDAPKTHMTHHAVSDHEATLRCWALSFYPAEITLTWQRDGEDQTQDTELVETRPAGDGTFQKWAAVVVPSGQEQRYTCHVQHEGLPKPLTLRWEAAAGGDKTHTCPPCPAPEAAGGPSVFLFPPKPKDTLMISRTPEVTCVVVDVSHEDPEVKFNWYVDGVEVHNAKTKPREEQYNSTYRVVSVLTVLHQDWLNGKEYKCKVSNKALPAPIEKTISKAKGQPREPQVYTLPPSREEMTKNQVSLTCLVKGFYPSDIAVEWESNGQPENNYKTTPPVLDSDGSFFLYSKLTVDKSRWQQGNVFSCSVMHEALHNHYTQKSLSLSPG

SEQ ID NO: 532 - protein, 916 aa, synthetic construct
  REGION 1..916: note = Description of sequence: Construct 4007
  DISULFID 494..549: note = Disulfide bond
APTSSSTKKTQLQLEALLLDLQMILNGINNYKNPKLTRMLTAKFYMPKKATELKHLQCLEEELKPLEEVLNLAQSKNFHLRPRDLISNINVIVLELKGSETTFMCEYADETATIVEFLNRWITFCQSIISTLTGGGGSGGGGSGGGGSGGGGSAPTSSSTKKTQLQLEALLLDLQMILNGINNYKNPKLTRMLTAKFYMPKKATELKHLQCLEEELKPLEEVLNLAQSKNFHLRPRDLISNINVIVLELKGSETTFMCEYADETATIVEFLNRWITFCQSIISTLTGGGGSGGGGSGGGGSGGGGSIQRTPKIQVYSRHPAENGKSNFLNCYVSGFHPSDIEVDLLKNGCRIEKVEHSDLSFSKDWSFYLLYYTEFTPTEKDEYACRVNHVTLSQPKIVKWDRDMGGGGSGSHSMRYFFTSVSRPGRGEPRFIAVGYVDDTQFVRFDSDAASQRMEPRAPWIEQEGPEYWDGETRKVKAHSQTHRVDLGTLRGCYNQSEAGSHTVQRMYGCDVGSDWRFLRGYHQYAYDGKDYIALKEDLRSWTAADMCAQTTKHKWEAAHVAEQLRAYLEGTCVEWLRRYLENGKETLQRTDAPKTHMTHHAVSDHEATLRCWALSFYPAEITLTWQRDGEDQTQDTELVETRPAGDGTFQKWAAVVVPSGQEQRYTCHVQHEGLPKPLTLRWEAAAGGDKTHTCPPCPAPEAAGGPSVFLFPPKPKDTLMISRTPEVTCVVVDVSHEDPEVKFNWYVDGVEVHNAKTKPREEQYNSTYRVVSVLTVLHQDWLNGKEYKCKVSNKALPAPIEKTISKAKGQPREPQVYTLPPSREEMTKNQVSLTCLVKGFYPSDIAVEWESNGQPENNYKTTPPVLDSDGSFFLYSKLTVDKSRWQQGNVFSCSVMHEALHNHYTQKSLSLSPG

SEQ ID NO: 533 - protein, 813 aa, synthetic construct
  REGION 1..813: note = Description of sequence: Construct 4008
  DISULFID 391..443: note = Disulfide bond
APTSSSTKKTQLQLEALLLDLQMILNGINNYKNPKLTRMLTAKFYMPKKATELKHLQCLEEELKPLEEVLNLAQSKNFHLRPRDLISNINVIVLELKGSETTFMCEYADETATIVEFLNRWITFCQSIISTLTGGGGSGGGGSGGGGSGGGGSAPTSSSTKKTQLQLEALLLDLQMILNGINNYKNPKLTRMLTAKFYMPKKATELKHLQCLEEELKPLEEVLNLAQSKNFHLRPRDLISNINVIVLELKGSETTFMCEYADETATIVEFLNRWITFCQSIISTLTGGGGSGGGGSGGGGSGGGGSGSHSMRYFFTSVSRPGRGEPRFIAVGYVDDTQFVRFDSDAASQRMEPRAPWIEQEGPEYWDGETRKVKAHSQTHRVDLGTLRGYCNQSEAGSHTVQRMYGCDVGSDWRFLRGYHQYAYDGKDYIALKEDLRSWTAACMAAQTTKHKWEAAHVAEQLRAYLEGTCVEWLRRYLENGKETLQRTDAPKTHMTHHAVSDHEATLRCWALSFYPAEITLTWQRDGEDQTQDTELVETRPCGDGTFQKWAAVVVPSGQEQRYTCHVQHEGLPKPLTLRWEAAAGGDKTHTCPPCPAPEAAGGPSVFLFPPKPKDTLMISRTPEVTCVVVDVSHEDPEVKFNWYVDGVEVHNAKTKPREEQYNSTYRVVSVLTVLHQDWLNGKEYKCKVSNKALPAPIEKTISKAKGQPREPQVYTLPPSREEMTKNQVSLTCLVKGFYPSDIAVEWESNGQPENNYKTTPPVLDSDGSFFLYSKLTVDKSRWQQGNVFSCSVMHEALHNHYTQKSLSLSPGK

SEQ ID NO: 534 - protein, 946 aa, synthetic construct
  REGION 1..946: note = Description of sequence: Construct 4125
  DISULFID 524..579: note = Disulfide bond
APTSSSTKKTQLQLEALLLDLQMILNGINNYKNPKLTRMLTAKFYMPKKATELKHLQCLEEELKPLEEVLNLAQSKNFHLRPRDLISNINVIVLELKGSETTFMCEYADETATIVEFLNRWITFCQSIISTLTGGGGSGGGGSGGGGSGGGGSAPTSSSTKKTQLQLEALLLDLQMILNGINNYKNPKLTRMLTAKFYMPKKATELKHLQCLEEELKPLEEVLNLAQSKNFHLRPRDLISNINVIVLELKGSETTFMCEYADETATIVEFLNRWITFCQSIISTLTGGGGSGGGGSGGGGSGGGGSIQRTPKIQVYSRHPAENGKSNFLNCYVSGFHPSDIEVDLLKNGCRIEKVEHSDLSFSKDWSFYLLYYTEFTPTEKDEYACRVNHVTLSQPKIVKWDRDMGGGGSGGGGSGGGGSGGGGSGGGGSGGGGSGGGGSGSHSMRYFFTSVSRPGRGEPRFIAVGYVDDTQFVRFDSDAASQRMEPRAPWIEQEGPEYWDGETRKVKAHSQTHRVDLGTLRGCYNQSEAGSHTVQRMYGCDVGSDWRFLRGYHQYAYDGKDYIALKEDLRSWTAADMCAQTTKHKWEAAHVAEQLRAYLEGTCVEWLRRYLENGKETLQRTDAPKTHMTHHAVSDHEATLRCWALSFYPAEITLTWQRDGEDQTQDTELVETRPAGDGTFQKWAAVVVPSGQEQRYTCHVQHEGLPKPLTLRWEAAAGGDKTHTCPPCPAPEAAGGPSVFLFPPKPKDTLMISRTPEVTCVVVDVSHEDPEVKFNWYVDGVEVHNAKTKPREEQYNSTYRVVSVLTVLHQDWLNGKEYKCKVSNKALPAPIEKTISKAKGQPREPQVYTLPPSREEMTKNQVSLTCLVKGFYPSDIAVEWESNGQPENNYKTTPPVLDSDGSFFLYSKLTVDKSRWQQGNVFSCSVMHEALHNHYTQKSLSLSPG

SEQ ID NO: 535 - protein, 941 aa, synthetic construct
  REGION 1..941: note = Description of sequence: Construct 4126
  DISULFID 519..574: note = Disulfide bond
APTSSSTKKTQLQLEALLLDLQMILNGINNYKNPKLTRMLTAKFYMPKKATELKHLQCLEEELKPLEEVLNLAQSKNFHLRPRDLISNINVIVLELKGSETTFMCEYADETATIVEFLNRWITFCQSIISTLTGGGGSGGGGSGGGGSGGGGSAPTSSSTKKTQLQLEALLLDLQMILNGINNYKNPKLTRMLTAKFYMPKKATELKHLQCLEEELKPLEEVLNLAQSKNFHLRPRDLISNINVIVLELKGSETTFMCEYADETATIVEFLNRWITFCQSIISTLTGGGGSGGGGSGGGGSGGGGSIQRTPKIQVYSRHPAENGKSNFLNCYVSGFHPSDIEVDLLKNGCRIEKVEHSDLSFSKDWSFYLLYYTEFTPTEKDEYACRVNHVTLSQPKIVKWDRDMGGGGSGGGGSGGGGSGGGGSGGGGSGGGGSGSHSMRYFFTSVSRPGRGEPRFIAVGYVDDTQFVRFDSDAASQRMEPRAPWIEQEGPEYWDGETRKVKAHSQTHRVDLGTLRGCYNQSEAGSHTVQRMYGCDVGSDWRFLRGYHQYAYDGKDYIALKEDLRSWTAADMCAQTTKHKWEAAHVAEQLRAYLEGTCVEWLRRYLENGKETLQRTDAPKTHMTHHAVSDHEATLRCWALSFYPAEITLTWQRDGEDQTQDTELVETRPAGDGTFQKWAAVVVPSGQEQRYTCHVQHEGLPKPLTLRWEAAAGGDKTHTCPPCPAPEAAGGPSVFLFPPKPKDTLMISRTPEVTCVVVDVSHEDPEVKFNWYVDGVEVHNAKTKPREEQYNSTYRVVSVLTVLHQDWLNGKEYKCKVSNKALPAPIEKTISKAKGQPREPQVYTLPPSREEMTKNQVSLTCLVKGFYPSDIAVEWESNGQPENNYKTTPPVLDSDGSFFLYSKLTVDKSRWQQGNVFSCSVMHEALHNHYTQKSLSLSPG

SEQ ID NO: 536 - protein, 936 aa, synthetic construct
  REGION 1..936: note = Description of sequence: Construct 4127
  DISULFID 514..569: note = Disulfide bond
APTSSSTKKTQLQLEALLLDLQMILNGINNYKNPKLTRMLTAKFYMPKKATELKHLQCLEEELKPLEEVLNLAQSKNFHLRPRDLISNINVIVLELKGSETTFMCEYADETATIVEFLNRWITFCQSIISTLTGGGGSGGGGSGGGGSGGGGSAPTSSSTKKTQLQLEALLLDLQMILNGINNYKNPKLTRMLTAKFYMPKKATELKHLQCLEEELKPLEEVLNLAQSKNFHLRPRDLISNINVIVLELKGSETTFMCEYADETATIVEFLNRWITFCQSIISTLTGGGGSGGGGSGGGGSGGGGSIQRTPKIQVYSRHPAENGKSNFLNCYVSGFHPSDIEVDLLKNGCRIEKVEHSDLSFSKDWSFYLLYYTEFTPTEKDEYACRVNHVTLSQPKIVKWDRDMGGGGSGGGGSGGGGSGGGGSGGGGSGSHSMRYFFTSVSRPGRGEPRFIAVGYVDDTQFVRFDSDAASQRMEPRAPWIEQEGPEYWDGETRKVKAHSQTHRVDLGTLRGCYNQSEAGSHTVQRMYGCDVGSDWRFLRGYHQYAYDGKDYIALKEDLRSWTAADMCAQTTKHKWEAAHVAEQLRAYLEGTCVEWLRRYLENGKETLQRTDAPKTHMTHHAVSDHEATLRCWALSFYPAEITLTWQRDGEDQTQDTELVETRPAGDGTFQKWAAVVVPSGQEQRYTCHVQHEGLPKPLTLRWEAAAGGDKTHTCPPCPAPEAAGGPSVFLFPPKPKDTLMISRTPEVTCVVVDVSHEDPEVKFNWYVDGVEVHNAKTKPREEQYNSTYRVVSVLTVLHQDWLNGKEYKCKVSNKALPAPIEKTISKAKGQPREPQVYTLPPSREEMTKNQVSLTCLVKGFYPSDIAVEWESNGQPENNYKTTPPVLDSDGSFFLYSKLTVDKSRWQQGNVFSCSVMHEALHNHYTQKSLSLSPG

SEQ ID NO: 537 - protein, 931 aa, synthetic construct
  REGION 1..931: note = Description of sequence: Construct 4128
  DISULFID 509..564: note = Disulfide bond
APTSSSTKKTQLQLEALLLDLQMILNGINNYKNPKLTRMLTAKFYMPKKATELKHLQCLEEELKPLEEVLNLAQSKNFHLRPRDLISNINVIVLELKGSETTFMCEYADETATIVEFLNRWITFCQSIISTLTGGGGSGGGGSGGGGSGGGGSAPTSSSTKKTQLQLEALLLDLQMILNGINNYKNPKLTRMLTAKFYMPKKATELKHLQCLEEELKPLEEVLNLAQSKNFHLRPRDLISNINVIVLELKGSETTFMCEYADETATIVEFLNRWITFCQSIISTLTGGGGSGGGGSGGGGSGGGGSIQRTPKIQVYSRHPAENGKSNFLNCYVSGFHPSDIEVDLLKNGCRIEKVEHSDLSFSKDWSFYLLYYTEFTPTEKDEYACRVNHVTLSQPKIVKWDRDMGGGGSGGGGSGGGGSGGGGSGSHSMRYFFTSVSRPGRGEPRFIAVGYVDDTQFVRFDSDAASQRMEPRAPWIEQEGPEYWDGETRKVKAHSQTHRVDLGTLRGCYNQSEAGSHTVQRMYGCDVGSDWRFLRGYHQYAYDGKDYIALKEDLRSWTAADMCAQTTKHKWEAAHVAEQLRAYLEGTCVEWLRRYLENGKETLQRTDAPKTHMTHHAVSDHEATLRCWALSFYPAEITLTWQRDGEDQTQDTELVETRPAGDGTFQKWAAVVVPSGQEQRYTCHVQHEGLPKPLTLRWEAAAGGDKTHTCPPCPAPEAAGGPSVFLFPPKPKDTLMISRTPEVTCVVVDVSHEDPEVKFNWYVDGVEVHNAKTKPREEQYNSTYRVVSVLTVLHQDWLNGKEYKCKVSNKALPAPIEKTISKAKGQPREPQVYTLPPSREEMTKNQVSLTCLVKGFYPSDIAVEWESNGQPENNYKTTPPVLDSDGSFFLYSKLTVDKSRWQQGNVFSCSVMHEALHNHYTQKSLSLSPG

SEQ ID NO: 538 - protein, 946 aa, synthetic construct
  REGION 1..946: note = Description of sequence: Construct 4129
  DISULFID 524..579: note = Disulfide bond
APTSSSTKKTQLQLEALLLDLQMILNGINNYKNPKLTRMLTAKFYMPKKATELKHLQCLEEELKPLEEVLNLAQSKNFHLRPRDLISNINVIVLELKGSETTFMCEYADETATIVEFLNRWITFCQSIISTLTGGGGSGGGGSGGGGSGGGGSAPTSSSTKKTQLQLEALLLDLQMILNGINNYKNPKLTRMLTAKFYMPKKATELKHLQCLEEELKPLEEVLNLAQSKNFHLRPRDLISNINVIVLELKGSETTFMCEYADETATIVEFLNRWITFCQSIISTLTGGGGSGGGGSGGGGSGGGGSIQRTPKIQVYSCHPAENGKSNFLNCYVSGFHPSDIEVDLLKNGCRIEKVEHSDLSFSKDWSFYLLYYTEFTPTEKDEYACRVNHVTLSQPKIVKWDRDMGGGGSGGGGSGGGGSGGGGSGGGGSGGGGSGGGGSGSHSMRYFFTSVSRPGRGEPRFIAVGYVDDTQFVRFDSDAASQRMEPRAPWIEQEGPEYWDGETRKVKAHSQTHRVDLGTLRGCYNQSEAGSHTVQRMYGCDVGSDWRFLRGYHQYAYDGKDYIALKEDLRSWTAADMCAQTTKHKWEAAHVAEQLRAYLEGTCVEWLRRYLENGKETLQRTDAPKTHMTHHAVSDHEATLRCWALSFYPAEITLTWQRDGEDQTQDTELVETRPCGDGTFQKWAAVVVPSGQEQRYTCHVQHEGLPKPLTLRWEAAAGGDKTHTCPPCPAPEAAGGPSVFLFPPKPKDTLMISRTPEVTCVVVDVSHEDPEVKFNWYVDGVEVHNAKTKPREEQYNSTYRVVSVLTVLHQDWLNGKEYKCKVSNKALPAPIEKTISKAKGQPREPQVYTLPPSREEMTKNQVSLTCLVKGFYPSDIAVEWESNGQPENNYKTTPPVLDSDGSFFLYSKLTVDKSRWQQGNVFSCSVMHEALHNHYTQKSLSLSPG

SEQ ID NO: 539 - protein, 941 aa, synthetic construct
  REGION 1..941: note = Description of sequence: Construct 4130
  DISULFID 519..574: note = Disulfide bond
APTSSSTKKTQLQLEALLLDLQMILNGINNYKNPKLTRMLTAKFYMPKKATELKHLQCLEEELKPLEEVLNLAQSKNFHLRPRDLISNINVIVLELKGSETTFMCEYADETATIVEFLNRWITFCQSIISTLTGGGGSGGGGSGGGGSGGGGSAPTSSSTKKTQLQLEALLLDLQMILNGINNYKNPKLTRMLTAKFYMPKKATELKHLQCLEEELKPLEEVLNLAQSKNFHLRPRDLISNINVIVLELKGSETTFMCEYADETATIVEFLNRWITFCQSIISTLTGGGGSGGGGSGGGGSGGGGSIQRTPKIQVYSCHPAENGKSNFLNCYVSGFHPSDIEVDLLKNGCRIEKVEHSDLSFSKDWSFYLLYYTEFTPTEKDEYACRVNHVTLSQPKIVKWDRDMGGGGSGGGGSGGGGSGGGGSGGGGSGGGGSGSHSMRYFFTSVSRPGRGEPRFIAVGYVDDTQFVRFDSDAASQRMEPRAPWIEQEGPEYWDGETRKVKAHSQTHRVDLGTLRGCYNQSEAGSHTVQRMYGCDVGSDWRFLRGYHQYAYDGKDYIALKEDLRSWTAADMCAQTTKHKWEAAHVAEQLRAYLEGTCVEWLRRYLENGKETLQRTDAPKTHMTHHAVSDHEATLRCWALSFYPAEITLTWQRDGEDQTQDTELVETRPCGDGTFQKWAAVVVPSGQEQRYTCHVQHEGLPKPLTLRWEAAAGGDKTHTCPPCPAPEAAGGPSVFLFPPKPKDTLMISRTPEVTCVVVDVSHEDPEVKFNWYVDGVEVHNAKTKPREEQYNSTYRVVSVLTVLHQDWLNGKEYKCKVSNKALPAPIEKTISKAKGQPREPQVYTLPPSREEMTKNQVSLTCLVKGFYPSDIAVEWESNGQPENNYKTTPPVLDSDGSFFLYSKLTVDKSRWQQGNVFSCSVMHEALHNHYTQKSLSLSPG

SEQ ID NO: 540 - protein, 936 aa, synthetic construct
  REGION 1..936: note = Description of sequence: Construct 4131
  DISULFID 514..569: note = Disulfide bond
APTSSSTKKTQLQLEALLLDLQMILNGINNYKNPKLTRMLTAKFYMPKKATELKHLQCLEEELKPLEEVLNLAQSKNFHLRPRDLISNINVIVLELKGSETTFMCEYADETATIVEFLNRWITFCQSIISTLTGGGGSGGGGSGGGGSGGGGSAPTSSSTKKTQLQLEALLLDLQMILNGINNYKNPKLTRMLTAKFYMPKKATELKHLQCLEEELKPLEEVLNLAQSKNFHLRPRDLISNINVIVLELKGSETTFMCEYADETATIVEFLNRWITFCQSIISTLTGGGGSGGGGSGGGGSGGGGSIQRTPKIQVYSCHPAENGKSNFLNCYVSGFHPSDIEVDLLKNGCRIEKVEHSDLSFSKDWSFYLLYYTEFTPTEKDEYACRVNHVTLSQPKIVKWDRDMGGGGSGGGGSGGGGSGGGGSGGGGSGSHSMRYFFTSVSRPGRGEPRFIAVGYVDDTQFVRFDSDAASQRMEPRAPWIEQEGPEYWDGETRKVKAHSQTHRVDLGTLRGCYNQSEAGSHTVQRMYGCDVGSDWRFLRGYHQYAYDGKDYIALKEDLRSWTAADMCAQTTKHKWEAAHVAEQLRAYLEGTCVEWLRRYLENGKETLQRTDAPKTHMTHHAVSDHEATLRCWALSFYPAEITLTWQRDGEDQTQDTELVETRPCGDGTFQKWAAVVVPSGQEQRYTCHVQHEGLPKPLTLRWEAAAGGDKTHTCPPCPAPEAAGGPSVFLFPPKPKDTLMISRTPEVTCVVVDVSHEDPEVKFNWYVDGVEVHNAKTKPREEQYNSTYRVVSVLTVLHQDWLNGKEYKCKVSNKALPAPIEKTISKAKGQPREPQVYTLPPSREEMTKNQVSLTCLVKGFYPSDIAVEWESNGQPENNYKTTPPVLDSDGSFFLYSKLTVDKSRWQQGNVFSCSVMHEALHNHYTQKSLSLSPG

SEQ ID NO: 541 - protein, 931 aa, synthetic construct
  REGION 1..931: note = Description of sequence: Construct 4132
  DISULFID 509..564: note = Disulfide bond
APTSSSTKKTQLQLEALLLDLQMILNGINNYKNPKLTRMLTAKFYMPKKATELKHLQCLEEELKPLEEVLNLAQSKNFHLRPRDLISNINVIVLELKGSETTFMCEYADETATIVEFLNRWITFCQSIISTLTGGGGSGGGGSGGGGSGGGGSAPTSSSTKKTQLQLEALLLDLQMILNGINNYKNPKLTRMLTAKFYMPKKATELKHLQCLEEELKPLEEVLNLAQSKNFHLRPRDLISNINVIVLELKGSETTFMCEYADETATIVEFLNRWITFCQSIISTLTGGGGSGGGGSGGGGSGGGGSIQRTPKIQVYSCHPAENGKSNFLNCYVSGFHPSDIEVDLLKNGCRIEKVEHSDLSFSKDWSFYLLYYTEFTPTEKDEYACRVNHVTLSQPKIVKWDRDMGGGGSGGGGSGGGGSGGGGSGSHSMRYFFTSVSRPGRGEPRFIAVGYVDDTQFVRFDSDAASQRMEPRAPWIEQEGPEYWDGETRKVKAHSQTHRVDLGTLRGCYNQSEAGSHTVQRMYGCDVGSDWRFLRGYHQYAYDGKDYIALKEDLRSWTAADMCAQTTKHKWEAAHVAEQLRAYLEGTCVEWLRRYLENGKETLQRTDAPKTHMTHHAVSDHEATLRCWALSFYPAEITLTWQRDGEDQTQDTELVETRPCGDGTFQKWAAVVVPSGQEQRYTCHVQHEGLPKPLTLRWEAAAGGDKTHTCPPCPAPEAAGGPSVFLFPPKPKDTLMISRTPEVTCVVVDVSHEDPEVKFNWYVDGVEVHNAKTKPREEQYNSTYRVVSVLTVLHQDWLNGKEYKCKVSNKALPAPIEKTISKAKGQPREPQVYTLPPSREEMTKNQVSLTCLVKGFYPSDIAVEWESNGQPENNYKTTPPVLDSDGSFFLYSKLTVDKSRWQQGNVFSCSVMHEALHNHYTQKSLSLSPG

SEQ ID NO: 542 - protein, 926 aa, synthetic construct
  REGION 1..926: note = Description of sequence: Construct 4133
  DISULFID 504..559: note = Disulfide bond
APTSSSTKKTQLQLEALLLDLQMILNGINNYKNPKLTRMLTAKFYMPKKATELKHLQCLEEELKPLEEVLNLAQSKNFHLRPRDLISNINVIVLELKGSETTFMCEYADETATIVEFLNRWITFCQSIISTLTGGGGSGGGGSGGGGSGGGGSAPTSSSTKKTQLQLEALLLDLQMILNGINNYKNPKLTRMLTAKFYMPKKATELKHLQCLEEELKPLEEVLNLAQSKNFHLRPRDLISNINVIVLELKGSETTFMCEYADETATIVEFLNRWITFCQSIISTLTGGGGSGGGGSGGGGSGGGGSIQRTPKIQVYSCHPAENGKSNFLNCYVSGFHPSDIEVDLLKNGCRIEKVEHSDLSFSKDWSFYLLYYTEFTPTEKDEYACRVNHVTLSQPKIVKWDRDMGGGGSGGGGSGGGGSGSHSMRYFFTSVSRPGRGEPRFIAVGYVDDTQFVRFDSDAASQRMEPRAPWIEQEGPEYWDGETRKVKAHSQTHRVDLGTLRGCYNQSEAGSHTVQRMYGCDVGSDWRFLRGYHQYAYDGKDYIALKEDLRSWTAADMCAQTTKHKWEAAHVAEQLRAYLEGTCVEWLRRYLENGKETLQRTDAPKTHMTHHAVSDHEATLRCWALSFYPAEITLTWQRDGEDQTQDTELVETRPCGDGTFQKWAAVVVPSGQEQRYTCHVQHEGLPKPLTLRWEAAAGGDKTHTCPPCPAPEAAGGPSVFLFPPKPKDTLMISRTPEVTCVVVDVSHEDPEVKFNWYVDGVEVHNAKTKPREEQYNSTYRVVSVLTVLHQDWLNGKEYKCKVSNKALPAPIEKTISKAKGQPREPQVYTLPPSREEMTKNQVSLTCLVKGFYPSDIAVEWESNGQPENNYKTTPPVLDSDGSFFLYSKLTVDKSRWQQGNVFSCSVMHEALHNHYTQKSLSLSPG

SEQ ID NO: 543 - protein, 306 aa, synthetic construct [sequence omitted]

SEQ ID NO: 544 - protein, 75 aa, synthetic construct
  REGION 1..75: note = Description of sequence: envelope protein NCBI Reference Sequence: YP_009724392.1
MYSFVSEETGTLIVNSVLLFLAFVVFLLVTLAILTALRLCAYCCNIVNVSLVKPSFYVYSRVKNLNSSRVPDLLV

SEQ ID NO: 545 - protein, 601 aa, synthetic construct
  REGION 1..601: note = Description of sequence: Helicase (Hel) NCBI Reference Sequence: YP_009725308.1
AVGACVLCNSQTSLRCGACIRRPFLCCKCCYDHVISTSHKLVLSVNPYVCNAPGCDVTDVTQLYLGGMSYYCKSHKPPISFPLCANGQVFGLYKNTCVGSDNVTDFNAIATCDWTNAGDYILANTCTERLKLFAAETLKATEETFKLSYGIATVREVLSDRELHLSWEVGKPRPPLNRNYVFTGYRVTKNSKVQIGEYTFEKGDYGDAVVYRGTTTYKLNVGDYFVLTSHTVMPLSAPTLVPQEHYVRITGLYPTLNISDEFSSNVANYQKVGMQKYSTLQGPPGTGKSHFAIGLALYYPSARIVYTACSHAAVDALCEKALKYLPIDKCSRIIPARARVECFDKFKVNSTLEQYVFCTVNALPETTADIVVFDEISMATNYDLSVVNARLRAKHYVYIGDPAQLPAPRTLLTKGTLEPEYFNSVCRLMKTIGPDMFLGTCRRCPAEIVDTVSALVYDNKLKAHKDKSAQCFKMFYKGVITHDVSSAINRPQIGVVREFLTRNPAWRKAVFISPYNSQNAVASKILGLPTQTVDSSQGSEYDYVIFTQTTETAHSCNVNRFNVAITRAKVGILCIMSDRDLYDKLQFTSLEIPRRNVATLQ

SEQ ID NO: 546 - protein, 222 aa, synthetic construct
  REGION 1..222: note = Description of sequence: membrane glycoprotein NCBI Reference Sequence: YP_009724393.1
MADSNGTITVEELKKLLEQWNLVIGFLFLTWICLLQFAYANRNRFLYIIKLIFLWLLWPVTLACFVLAAVYRINWITGGIAIAMACLVGLMWLSYFIASFRLFARTRSMWSFNPETNILLNVPLHGTILTRPLLESELVIGAVILRGHLRIAGHHLGRCDIKDLPKEITVATSRTLSYYKLGASQRVAGDSGFAAYSRYRIGNYKLNTDHSSSSDNIALLVQ

SEQ ID NO: 547 - protein, 180 aa, synthetic construct
  REGION 1..180: note = Description of sequence: Nonstructural Protein (nsp) one (nsp1) leader protein NCBI Reference Sequence: YP_009725297.1
MESLVPGFNEKTHVQLSLPVLQVRDVLVRGFGDSVEEVLSEARQHLKDGTCGLVEVEKGVLPQLEQPYVFIKRSDARTAPHGHVMVELVAELEGIQYGRSGETLGVLVPHVGEIPVAYRKVLLRKNGNKGAGGHSYGADLKSFDLGDELGTDPYEDFQENWNTKHSSGVTRELMRELNGG

SEQ ID NO: 548 - protein, 638 aa, synthetic construct
  REGION 1..638: note = Description of sequence: nsp2 NCBI Reference Sequence: YP_009725298.1
AYTRYVDNNFCGPDGYPLECIKDLLARAGKASCTLSEQLDFIDTKRGVYCCREHEHEIAWYTERSEKSYELQTPFEIKLAKKFDTFNGECPNFVFPLNSIIKTIQPRVEKKKLDGFMGRIRSVYPVASPNECNQMCLSTLMKCDHCGETSWQTGDFVKATCEFCGTENLTKEGATTCGYLPQNAVVKIYCPACHNSEVGPEHSLAEYHNESGLKTILRKGGRTIAFGGCVFSYVGCHNKCAYWVPRASANIGCNHTGVVGEGSEGLNDNLLEILQKEKVNINIVGDFKLNEEIAIILASFSASTSAFVETVKGLDYKAFKQIVESCGNFKVTKGKAKKGAWNIGEQKSILSPLYAFASEAARVVRSIFSRTLETAQNSVRVLQKAAITILDGISQYSLRLIDAMMFTSDLATNNLVVMAYITGGVVQLTSQWLTNIFGTVYEKLKPVLDWLEEKFKEGVEFLRDGWEIVKFISTCACEIVGGQIVTCAKEIKESVQTFFKLVNKFLALCADSIIIGGAKLKALNLGETFVTHSKGLYRKCVKSREETGLLMPLKAPKEIIFLEGETLPTEVLTEEVVLKTGDLQPLEQPTSEAVEAPLVGTPVCINGLMLLEIKDTEKYCALAPNMMVTNNTFTLKGG

SEQ ID NO: 549 - protein, 500 aa, synthetic construct
  REGION 1..500: note = Description of sequence: nsp4 NCBI Reference Sequence: YP_009725300.1
KIVNNWLKQLIKVTLVFLFVAAIFYLITPVHVMSKHTDFSSEIIGYKAIDGGVTRDIASTDTCFANKHADFDTWFSQRGGSYTNDKACPLIAAVITREVGFVVPGLPGTILRTTNGDFLHFLPRVFSAVGNICYTPSKLIEYTDFATSACVLAAECTIFKDASGKPVPYCYDTNVLEGSVAYESLRPDTRYVLMDGSIIQFPNTYLEGSVRVVTTFDSEYCRHGTCERSEAGVCVSTSGRWVLNNDYYRSLPGVFCGVDAVNLLTNMFTPLIQPIGALDISASIVAGGIVAIVVTCLAYYFMRFRRAFGEYSHVVAFNTLLFLMSFTVLCLTPVYSFLPGVYSVIYLYLTFYLTNDVSFLAHIQWMVMFTPLVPFWITIAYIICISTKHFYWFFSNYLKRRVVFNGVSFSTFEEAALCTFLLNKEMYLKLRSDVLLPLTQYNRYLALYNKYKYFSGAMDTTSYREAACCHLAKALNDFSNSGSDVLYQPPQTSITSAVLQ

SEQ ID NO: 550 - protein, 290 aa, synthetic construct
  REGION 1..290: note = Description of sequence: nsp6 NCBI Reference Sequence: YP_009725302.1
SAVKRTIKGTHHWLLLTILTSLLVLVQSTQWSLFFFLYENAFLPFAMGIIAMSAFAMMFVKHKHAFLCLFLLPSLATVAYFNMVYMPASWVMRIMTWLDMVDTSLSGFKLKDCVMYASAVVLLILMTARTVYDDGARRVWTLMNVLTLVYKVYYGNALDQAISMWALIISVTSNYSGVVTTVMFLARGIVFMCVEYCPIFFITGNTLQCIMLVYCFLGYFCTCYFGLFCLLNRYFRLTLGVYDYLVSTQEFRYMNSQGLLPPKNSIDAFKLNIKLLGVGGKPCIKVATVQ

SEQ ID NO: 551 - protein, 83 aa, synthetic construct
  REGION 1..83: note = Description of sequence: nsp7 NCBI Reference Sequence: YP_009725303.1
SKMSDVKCTSVVLLSVLQQLRVESSSKLWAQCVQLHNDILLAKDTTEAFEKMVSLLSVLLSMQGAVDINKLCEEMLDNRATLQ

SEQ ID NO: 552 - protein, 198 aa, synthetic construct
  REGION 1..198: note = Description of sequence: nsp8 NCBI Reference Sequence: YP_009725304
AIASEFSSLPSYAAFATAQEAYEQAVANGDSEVVLKKLKKSLNVAKSEFDRDAAMQRKLEKMADQAMTQMYKQARSEDKRAKVTSAMQTMLFTMLRKLDNDALNNIINNARDGCVPLNIIPLTTAAKLMVVIPDYNTYKNTCDGTTFTYASALWEIQQVVDADSKIVQLSEISMDNSPNLAWPLIVTALRANSAVKLQ

SEQ ID NO: 553 - protein, 113 aa, Severe acute respiratory syndrome coronavirus 2 (SARS-CoV-2)
  REGION 1..113: note = Description of sequence: nsp9
NNELSPVALRQMSCAAGTTQTACTDDNALAYYNTTKGGRFVLALLSDLQDLKWARFPKSDGTGTIYTELEPPCRFVTDTPKGPKVKYLYFIKGLNNLNRGMVLGSLAATVRLQ

SEQ ID NO: 554 - protein, 139 aa, Severe acute respiratory syndrome coronavirus 2 (SARS-CoV-2)
  REGION 1..139: note = Description of sequence: nsp10
AGNATEVPANSTVLSFCAFAVDAAKAYKDYLASGGQPITNCVKMLCTHTGTGQAITVTPEANMDQESFGGASCCLYCRCHIDHPNPKGFCDLKGKYVQIPTTCANDPVGFTLKNTVCTVCGMWKGYGCSCDQLREPMLQ

SEQ ID NO: 555 - protein, 527 aa, Severe acute respiratory syndrome coronavirus 2 (SARS-CoV-2)
  REGION 1..527: note = Description of sequence: nsp14
AENVTGLFKDCSKVITGLHPTQAPTHLSVDTKFKTEGLCVDIPGIPKDMTYRRLISMMGFKMNYQVNGYPNMFITREEAIRHVRAWIGFDVEGCHATREAVGTNLPLQLGFSTGVNLVAVPTGYVDTPNNTDFSRVSAKPPPGDQFKHLIPLMYKGLPWNVVRIKIVQMLSDTLKNLSDRVVFVLWAHGFELTSMKYFVKIGPERTCCLCDRRATCFSTASDTYACWHHSIGFDYVYNPFMIDVQQWGFTGNLQSNHDLYCQVHGNAHVASCDAIMTRCLAVHECFVKRVDWTIEYPIIGDELKINAACRKVQHMVVKAALLADKFPVLHDIGNPKAIKCVPQADVEWKFYDAQPCSDKAYKIEELFYSYATHSDKFTDGVCLFWNCNVDRYPANSIVCRFDTRVLSNLNLPGCDGGSLYVNKHAFHTPAFDKSAFVNLKQLPFFYYSDSPCESHGKQVVSDIDYVPLKSATCITRCNLGGAVCRHHANEYRLYLDAYNMMISAGFSLWVYKQFDTYNLWNTFTRLQ

SEQ ID NO: 556 - protein, 346 aa, Severe acute respiratory syndrome coronavirus 2 (SARS-CoV-2)
  REGION 1..346: note = Description of sequence: nsp15
SLENVAFNVVNKGHFDGQQGEVPVSIINNTVYTKVDGVDVELFENKTTLPVNVAFELWAKRNIKPVPEVKILNNLGVDIAANTVIWDYKRDAPAHISTIGVCSMTDIAKKPTETICAPLTVFFDGRVDGQVDLFRNARNGVLITEGSVKGLQPSVGPKQASLNGVTLIGEAVKTQFNYYKKVDGVVQQLPETYFTQSRNLQEFKPRSQMEIDFLELAMDEFIERYKLEGYAFEHIVYGDFSHSQLGGLHLLIGLAKRFKESPFELEDFIPMDSTVKNYFITDAQTGSSKCVCSVIDLLLDDFVEIIKSQDLSVVSKVVKVTIDYTEISFMLWCKDGHVETFYPKLQ

SEQ ID NO: 557 - protein, 298 aa, Severe acute respiratory syndrome coronavirus 2 (SARS-CoV-2)
  REGION 1..298: note = Description of sequence: nsp16
SSQAWQPGVAMPNLYKMQRMLLEKCDLQNYGDSATLPKGIMMNVAKYTQLCQYLNTLTLAVPYNMRVIHFGAGSDKGVAPGTAVLRQWLPTGTLLVDSDLNDFVSDADSTLIGDCATVHTANKWDLIISDMYDPKTKNVTKENDSKEGFFTYICGFIQQKLALGGSVAIKITEHSWNADLYKLMGHFAWWTAFVTNVNASSSEAFLIGCNYLGKPREQIDGYVMHANYIFWRNTNPIQLSSYSLFDMSKFPLKLRGTAVMSLKEGQINDMILSLLSKGRLIIRENNRVVISSDVLVNN

SEQ ID NO: 558 - protein, 419 aa, Severe acute respiratory syndrome coronavirus 2 (SARS-CoV-2)
  REGION 1..419: note = Description of sequence: nucleocapsid phosphoprotein
MSDNGPQNQRNAPRITFGGPSDSTGSNQNGERSGARSKQRRPQGLPNNTASWFTALTQHGKEDLKFPRGQGVPINTNSSPDDQIGYYRRATRRIRGGDGKMKDLSPRWYFYYLGTGPEAGLPYGANKDGIIWVATEGALNTPKDHIGTRNPANNAAIVLQLPQGTTLPKGFYAEGSRGGSQASSRSSSRSRNSSRNSTPGSSRGTSPARMAGNGGDAALALLLLDRLNQLESKMSGKGQQQQGQTVTKKSAAEASKKPRQKRTATKAYNVTQAFGRRGPEQTQGNFGDQELIRQGTDYKHWPQIAQFAPSASAFFGMSRIGMEVTPSGTWLTYTGAIKLDDKDPNFKDQVILLNKHIDAYKTFPPTEPKKDKKKKADETQALPQRQKKQQTVTLLPAADLDDFSKQLQQSMSSADSTQA

SEQ ID NO: 559 - protein, 274 aa, Severe acute respiratory syndrome coronavirus 2 (SARS-CoV-2)
  REGION 1..274: note = Description of sequence: ORF3a protein
MDLFMRIFTIGTVTLKQGEIKDATPSDFVRATATIPIQASLPFGWLIVGVALLAVFQSASKIITLKKRWQLALSKGVHFVCNLLLLFVTVYSHLLLVAAGLEAPFLYLYALVYFLQSINFVRIIMRLWLCWKCRSKNPLLYDANYFLCWHTNCYDYCIPYNSVTSSIVITSGDGTTSPISEHDYQIGGYTEKWESGVKDCVVLHSYFTSDYYQLYSTQLSTDTGVEHVTFFIYNKIVDEPEEHVQIHTIDGSSGVVNPVMEPIYDEPTTTTSVP

SEQ ID NO: 560 - protein, 61 aa, Severe acute respiratory syndrome coronavirus 2 (SARS-CoV-2)
  REGION 1..61: note = Description of sequence: ORF6
MFHLVDFQVTIAEILLIIMRTFKVSIWNLDYIINLIIKNLSKSLTENKYSQLDEEQPMEID

SEQ ID NO: 561 - protein, 121 aa, Severe acute respiratory syndrome coronavirus 2 (SARS-CoV-2)
  REGION 1..121: note = Description of sequence: ORF7
MKIILFLALITLATCELYHYQECVRGTTVLLKEPCSSGTYEGNSPFHPLADNKFALTCFSTQFAFACPDGVKHVYQLRARSVSPKLFIRQEEVQELYSPIFLIVAAIVFITLCFTLKRKTE

SEQ ID NO: 562 - protein, 121 aa, Severe acute respiratory syndrome coronavirus 2 (SARS-CoV-2)
  REGION 1..121: note = Description of sequence: ORF8
MKFLVFLGIITTVAAFHQECSLQSCTQHQPYVVDDPCPIHFYSKWYIRVGARKSAPLIELCVDEAGSKSPIQYIDIGNYTVSCLPFTINCQEPKLGSLVVRCSFYEDFLEYHDVRVVLDFI

SEQ ID NO: 563 - protein, 38 aa, Severe acute respiratory syndrome coronavirus 2 (SARS-CoV-2)
  REGION 1..38: note = Description of sequence: ORF10
MGYINVFAFPFTIYSLLLCRMNSRNYIAQVDVVNFNLT

SEQ ID NO: 564 - protein, 1945 aa, Severe acute respiratory syndrome coronavirus 2 (SARS-CoV-2)
  REGION 1..1945: note = Description of sequence: "predicted phosphoesterase papain-like proteinase (PLpro) nsp3 "
APTKVTFGDDTVIEVQGYKSVNITFELDERIDKVLNEKCSAYTVELGTEVNEFACVVADAVIKTLQPVSELLTPLGIDLDEWSMATYYLFDESGEFKLASHMYCSFYPPDEDEEEGDCEEEEFEPSTQYEYGTEDDYQGKPLEFGATSAALQPEEEQEEDWLDDDSQQTVGQQDGSEDNQTTTIQTIVEVQPQLEMELTPVVQTIEVNSFSGYLKLTDNVYIKNADIVEEAKKVKPTVVVNAANVYLKHGGGVAGALNKATNNAMQVESDDYIATNGPLKVGGSCVLSGHNLAKHCLHVVGPNVNKGEDIQLLKSAYENFNQHEVLLAPLLSAGIFGADPIHSLRVCVDTVRTNVYLAVFDKNLYDKLVSSFLEMKSEKQVEQKIAEIPKEEVKPFITESKPSVEQRKQDDKKIKACVEEVTTTLEETKFLTENLLLYIDINGNLHPDSATLVSDIDITFLKKDAPYIVGDVVQEGVLTAVVIPTKKAGGTTEMLAKALRKVPTDNYITTYPGQGLNGYTVEEAKTVLKKCKSAFYILPSIISNEKQEILGTVSWNLREMLAHAEETRKLMPVCVETKAIVSTIQRKYKGIKIQEGVVDYGARFYFYTSKTTVASLINTLNDLNETLVTMPLGYVTHGLNLEEAARYMRSLKVPATVSVSSPDAVTAYNGYLTSSSKTPEEHFIETISLAGSYKDWSYSGQSTQLGIEFLKRGDKSVYYTSNPTTFHLDGEVITFDNLKTLLSLREVRTIKVFTTVDNINLHTQVVDMSMTYGQQFGPTYLDGADVTKIKPHNSHEGKTFYVLPNDDTLRVEAFEYYHTTDPSFLGRYMSALNHTKKWKYPQVNGLTSIKWADNNCYLATALLTLQQIELKFNPPALQDAYYRARAGEAANFCALILAYCNKTVGELGDVRETMSYLFQHANLDSCKRVLNVVCKTCGQQQTTLKGVEAVMYMGTLSYEQFKKGVQIPCTCGKQATKYLVQQESPFVMMSAPPAQYELKHGTFTCASEYTGNYQCGHYKHITSKETLYCIDGALLTKSSEYKGPITDVFYKENSYTTTIKPVTYKLDGVVCTEIDPKLDNYYKKDNSYFTEQPIDLVPNQPYPNASFDNFKFVCDNIKFADDLNQLTGYKKPASRELKVTFFPDLNGDVVAIDYKHYTPSFKKGAKLLHKPIVWHVNNATNKATYKPNTWCIRCLWSTKPVETSNSFDVLKSEDAQGMDNLACEDLKPVSEEVVENPTIQKDVLECNVKTTEVVGDIILKPANNSLKITEEVGHTDLMAAYVDNSSLTIKKPNELSRVLGLKTLATHGLAAVNSVPWDTIANYAKPFLNKVVSTTTNIVTRCLNRVCTNYMPYFFTLLLQLCTFTRSTNSRIKASMPTTIAKNTVKSVGKFCLEASFNYLKSPNFSKLINIIIWFLLLSVCLGSLIYSTAALGVLMSNLGMPSYCTGYREGYLNSTNVTIATYCTGSIPCSVCLSGLDSLDTYPSLETIQITISSFKWDLTAFGLVAEWFLAYILFTRFFYVLGLAAIMQLFFSYFAVHFISNSWLMWLIINLVQMAPISAMVRMYIFFASFYYVWKSYVHVVDGCNSSTCMMCYKRNRATRVECTTIVNGVRRSFYVYANGGKGFCKLHNWNCVNCDTFCAGSTFISDEVARDLSLQFKRPINPTDQSSYIVDSVTVKNGSIHLYFDKAGQKTYERHSLSHFVNLDNLRANNTKGSLPINVIVFDGKSKCEESSAKSASVYYSQLMCQPILLLDQALVSDVGDSAEVAVKMFDAYVNTFSSTFNVPMEKLKTLVATAEAELAKNVSLDNVLSTFISAARQGFVDSDVETKDVVECLKLSHQSDIEVTGDSCNNYMLTYNKVENMTPRDLGACIDCSARHINAQVAKSHNIALIWNVKDFMSLSEQLRKQIRSAAKKNNLPFKLTCATTRQVVNVVTTKIALKGG

SEQ ID NO: 565 - protein, 932 aa, Severe acute respiratory syndrome coronavirus 2 (SARS-CoV-2)
  REGION 1..932: note = Description of sequence: RNA-dependent RNA polymerase (RDpol)
SADAQSFLNRVCGVSAARLTPCGTGTSTDVVYRAFDIYNDKVAGFAKFLKTNCCRFQEKDEDDNLIDSYFVVKRHTFSNYQHEETIYNLLKDCPAVAKHDFFKFRIDGDMVPHISRQRLTKYTMADLVYALRHFDEGNCDTLKEILVTYNCCDDDYFNKKDWYDFVENPDILRVYANLGERVRQALLKTVQFCDAMRNAGIVGVLTLDNQDLNGNWYDFGDFIQTTPGSGVPVVDSYYSLLMPILTLTRALTAESHVDTDLTKPYIKWDLLKYDFTEERLKLFDRYFKYWDQTYHPNCVNCLDDRCILHCANFNVLFSTVFPPTSFGPLVRKIFVDGVPFVVSTGYHFRELGVVHNQDVNLHSSRLSFKELLVYAADPAMHAASGNLLLDKRTTCFSVAALTNNVAFQTVKPGNFNKDFYDFAVSKGFFKEGSSVELKHFFFAQDGNAAISDYDYYRYNLPTMCDIRQLLFVVEVVDKYFDCYDGGCINANQVIVNNLDKSAGFPFNKWGKARLYYDSMSYEDQDALFAYTKRNVIPTITQMNLKYAISAKNRARTVAGVSICSTMTNRQFHQKLLKSIAATRGATVVIGTSKFYGGWHNMLKTVYSDVENPHLMGWDYPKCDRAMPNMLRIMASLVLARKHTTCCSLSHRFYRLANECAQVLSEMVMCGGSLYVKPGGTSSGDATTAYANSVFNICQAVTANVNALLSTDGNKIADKYVRNLQHRLYECLYRNRDVDTDFVNEFYAYLRKHFSMMILSDDAVVCFNSTYASQGLVASIKNFKSVLYYQNNVFMSEAKCWTETDLTKGPHEFCSQHTMLVKQGDDYVYLPYPDPSRILGAGCFVDDIVKTDGTLMIERFVSLAIDAYPLTKHPNQEYADVFHLYLQYIRKLHDELTGHMLDMYSVMLTNDNTSRYWEPEFYEAMYTPHTVLQ

SEQ ID NO: 566 - protein, 1273 aa, Severe acute respiratory syndrome coronavirus 2 (SARS-CoV-2)
  REGION 1..1273: note = Description of sequence: surface glycoprotein NCBI Reference Sequence: YP_009724390.1
MFVFLVLLPLVSSQCVNLTTRTQLPPAYTNSFTRGVYYPDKVFRSSVLHSTQDLFLPFFSNVTWFHAIHVSGTNGTKRFDNPVLPFNDGVYFASTEKSNIIRGWIFGTTLDSKTQSLLIVNNATNVVIKVCEFQFCNDPFLGVYYHKNNKSWMESEFRVYSSANNCTFEYVSQPFLMDLEGKQGNFKNLREFVFKNIDGYFKIYSKHTPINLVRDLPQGFSALEPLVDLPIGINITRFQTLLALHRSYLTPGDSSSGWTAGAAAYYVGYLQPRTFLLKYNENGTITDAVDCALDPLSETKCTLKSFTVEKGIYQTSNFRVQPTESIVRFPNITNLCPFGEVFNATRFASVYAWNRKRISNCVADYSVLYNSASFSTFKCYGVSPTKLNDLCFTNVYADSFVIRGDEVRQIAPGQTGKIADYNYKLPDDFTGCVIAWNSNNLDSKVGGNYNYLYRLFRKSNLKPFERDISTEIYQAGSTPCNGVEGFNCYFPLQSYGFQPTNGVGYQPYRVVVLSFELLHAPATVCGPKKSTNLVKNKCVNFNFNGLTGTGVLTESNKKFLPFQQFGRDIADTTDAVRDPQTLEILDITPCSFGGVSVITPGTNTSNQVAVLYQDVNCTEVPVAIHADQLTPTWRVYSTGSNVFQTRAGCLIGAEHVNNSYECDIPIGAGICASYQTQTNSPRRARSVASQSIIAYTMSLGAENSVAYSNNSIAIPTNFTISVTTEILPVSMTKTSVDCTMYICGDSTECSNLLLQYGSFCTQLNRALTGIAVEQDKNTQEVFAQVKQIYKTPPIKDFGGFNFSQILPDPSKPSKRSFIEDLLFNKVTLADAGFIKQYGDCLGDIAARDLICAQKFNGLTVLPPLLTDEMIAQYTSALLAGTITSGWTFGAGAALQIPFAMQMAYRFNGIGVTQNVLYENQKLIANQFNSAIGKIQDSLSSTASALGKLQDVVNQNAQALNTLVKQLSSNFGAISSVLNDILSRLDKVEAEVQIDRLITGRLQSLQTYVTQQLIRAAEIRASANLAATKMSECVLGQSKRVDFCGKGYHLMSFPQSAPHGVVFLHVTYVPAQEKNFTTAPAICHDGKAHFPREGVFVSNGTHWFVTQRNFYEPQIITTDNTFVSGNCDVVIGIVNNTVYDPLQPELDSFKEELDKYFKNHTSPDVDLGDISGINASVVNIQKEIDRLNEVAKNLNESLIDLQELGKYEQYIKWPWYIWLGFIAGLIAIVMVTIMLCCMTSCCSCLKGCCSCGSCCKFDEDDSEPVLKGVKLHYT

SEQ ID NO: 567 - protein, 1278 aa, Homo sapiens
  VARIANT 70: note = X can be F or V
  VARIANT 161..162: note = Xaa can be any naturally occurring amino acid
  VARIANT 227: note = Xaa can be A or V
MFVFLVLLPLVSSQCVNLRTRTQLPPAYTNSFTRGVYYPDKVFRSSVLHSTQDLFLPFFSNVTWFHAIHXSGTNGSGTNGTKRFDNPVLPFNDGVYFASIEKSNIIRGWIFGTTLDSKTQSLLIVNNATNVVIKVCEFQFCNDPFLDVYYHKNNKSWMESXXGVYSSANNCTFEYVSQPFLMDLEGKQGNFKNLREFVFKNIDGYFKIYSKHTPINLVRDLPQGFSXLEPLVDLPIGINITRFQTLLALHRSYLTPGDSSSGLTAGAAAYYVGYLQPRTFLLKYNENGTITDAVDCALDPLSETKCTLKSFTVEKGIYQTSNFRVQPTESIVRFPNITNLCPFGEVFNATRFASVYAWNRKRISNCVADYSVLYNSASFSTFKCYGVSPTKLNDLCFTNVYADSFVIRGDEVRQIAPGQTGNIADYNYKLPDDFTGCVIAWNSNNLDSKVGGNYNYRYRLFRKSNLKPFERDISTEIYQAGSKPCNGVEGFNCYFPLQSYGFQPTNGVGYQPYRVVVLSFELLHAPATVCGPKKSTNLVKNKCVNFNFNGLTGTGVLTESNKKFLPFQQFGRDIADTTDAVRDPQTLEILDITPCSFGGVSVITPGTNTSNQVAVLYQGVNCTEVPVAIHADQLTPTWRVYSTGSNVFQTRAGCLIGAEHVNNSYECDIPIGAGICASYQTQTNSRRRARSVASQSIIAYTMSLGAENSVAYSNNSIAIPTNFTISVTTEILPVSMTKTSVDCTMYICGDSTECSNLLLQYGSFCTQLNRALTGIAVEQDKNTQEVFAQVKQIYKTPPIKDFGGFNFSQILPDPSKPSKRSFIEDLLFNKVTLADAGFIKQYGDCLGDIAARDLICAQKFNGLTVLPPLLTDEMIAQYTSALLAGTITSGWTFGAGAALQIPFAMQMAYRFNGIGVTQNVLYENQKLIANQFNSAIGKIQDSLSSTASALGKLQNVVNQNAQALNTLVKQLSSNFGAISSVLNDILSRLDKVEAEVQIDRLITGRLQSLQTYVTQQLIRAAEIRASANLAATKMSECVLGQSKRVDFCGKGYHLMSFPQSAPHGVVFLHVTYVPAQEKNFTTAPAICHDGKAHFPREGVFVSNGTHWFVTQRNFYEPQIITTDNTFVSGNCDVVIGIVNNTVYDPLQPELDSFKEELDKYFKNHTSPDVDLGDISGINASVVNIQKEIDRLNEVAKNLNESLIDLQELGKYEQYIKWPWYIWLGFIAGLIAIVMVTIMLCCMTSCCSCLKGCCSCGSCCKFDEDDSEPVLKGVKLHYT

SEQ ID NO: 568 - protein, 1270 aa, Homo sapiens
  VARIANT 678: note = Xaa can be H or K
MFVFLVLLPLVSSQCVNLTTRTQLPPAYTNSFTRGVYYPDKVFRSSVLHSTQDLFLPFFSNVTWFHVISGTNGTKRFDNPVLPFNDGVYFASIEKSNIIRGWIFGTTLDSKTQSLLIVNNATNVVIKVCEFQFCNDPFLDHKNNKSWMESEFRVYSSANNCTFEYVSQPFLMDLEGKQGNFKNLREFVFKNIDGYFKIYSKHTPIIVREPEDLPQGFSALEPLVDLPIGINITRFQTLLALHRSYLTPGDSSSGWTAGAAAYYVGYLQPRTFLLKYNENGTITDAVDCALDPLSETKCTLKSFTVEKGIYQTSNFRVQPTESIVRFPNITNLCPFDEVFNATRFASVYAWNRKRISNCVADYSVLYNLAPFFTFKCYGVSPTKLNDLCFTNVYADSFVIRGDEVRQIAPGQTGNIADYNYKLPDDFTGCVIAWNSNKLDSKVSGNYNYLYRLFRKSNLKPFERDISTEIYQAGNKPCNGVAGFNCYFPLRSYSFRPTYGVGHQPYRVVVLSFELLHAPATVCGPKKSTNLVKNKCVNFNFNGLKGTGVLTESNKKFLPFQQFGRDIADTTDAVRDPQTLEILDITPCSFGGVSVITPGTNTSNQVAVLYQGVNCTEVPVAIHADQLTPTWRVYSTGSNVFQTRAGCLIGAEYVNNSYECDIPIGAGICASYQTQTKSXRRARSVASQSIIAYTMSLGAENSVAYSNNSIAIPTNFTISVTTEILPVSMTKTSVDCTMYICGDSTECSNLLLQYGSFCTQLKRALTGIAVEQDKNTQEVFAQVKQIYKTPPIKYFGGFNFSQILPDPSKPSKRSFIEDLLFNKVTLADAGFIKQYGDCLGDIAARDLICAQKFKGLTVLPPLLTDEMIAQYTSALLAGTITSGWTFGAGAALQIPFAMQMAYRFNGIGVTQNVLYENQKLIANQFNSAIGKIQDSLSSTASALGKLQDVVNHNAQALNTLVKQLSSKFGAISSVLNDIFSRLDKVEAEVQIDRLITGRLQSLQTYVTQQLIRAAEIRASANLAATKMSECVLGQSKRVDFCGKGYHLMSFPQSAPHGVVFLHVTYVPAQEKNFTTAPAICHDGKAHFPREGVFVSNGTHWFVTQRNFYEPQIITTDNTFVSGNCDVVIGIVNNTVYDPLQPELDSFKEELDKYFKNHTSPDVDLGDISGINASVVNIQKEIDRLNEVAKNLNESLIDLQELGKYEQYIKWPWYIWLGFIAGLIAIVMVTIMLCCMTSCCSCLKGCCSCGSCCKFDEDDSEPVLKGVKLHYT

SEQ ID NO: 569 - protein, 10 aa, synthetic construct
  REGION 1..10: note = Description of sequence: epitope presenting peptide
TSEDMLNPNY

SEQ ID NO: 570 - protein, 14 aa, synthetic construct
  REGION 1..14: note = Description of sequence: epitope presenting peptide
TGVHAGTDLEGNFY

SEQ ID NO: 571 - protein, 9 aa, synthetic construct
  REGION 1..9: note = Description of sequence: epitope presenting peptide
TTDLEGNFY

SEQ ID NO: 572 - protein, 15 aa, synthetic construct
  REGION 1..15: note = Description of sequence: epitope presenting peptide
DVTDVTQLYLGGMSY

SEQ ID NO: 573 - protein, 10 aa, synthetic construct
  REGION 1..10: note = Description of sequence: epitope presenting peptide
ATEETFKLSY

SEQ ID NO: 574 - protein, 12 aa, synthetic construct
  REGION 1..12: note = Description of sequence: epitope presenting peptide
ISDEFSSNVANY

SEQ ID NO: 575 - protein, 10 aa, synthetic construct
  REGION 1..10: note = Description of sequence: epitope presenting peptide
TVDSSQGSEY

SEQ ID NO: 576 - protein, 9 aa, synthetic construct
  REGION 1..9: note = Description of sequence: epitope presenting peptide
TVDSQGSEY

SEQ ID NO: 577 - protein, 14 aa, synthetic construct
  REGION 1..14: note = Description of sequence: epitope presenting peptide
ASQRVAGDSGFAAY

SEQ ID NO: 578 - protein, 9 aa, synthetic construct
  REGION 1..9: note = Description of sequence: epitope presenting peptide
ASDSGFAAY

SEQ ID NO: 579 - protein, 10 aa, synthetic construct
  REGION 1..10: note = Description of sequence: epitope presenting peptide
VAGDSGFAAY

SEQ ID NO: 580 - protein, 9 aa, synthetic construct
  REGION 1..9: note = Description of sequence: epitope presenting peptide
VADSGFAAY

SEQ ID NO: 581 - protein, 10 aa, synthetic construct
  REGION 1..10: note = Description of sequence: epitope presenting peptide
LAMDEFIERY

SEQ ID NO: 582 - protein, 9 aa, synthetic construct
  REGION 1..9: note = Description of sequence: epitope presenting peptide
LADEFIERY

SEQ ID NO: 583 - protein, 11 aa, synthetic construct
  REGION 1..11: note = Description of sequence: epitope presenting peptide
ITEHSWNADLY

SEQ ID NO: 584 - protein, 12 aa, synthetic construct
  REGION 1..12: note = Description of sequence: epitope presenting peptide
YVDNNFCGPDGY

SEQ ID NO: 585 - protein, 9 aa, synthetic construct
  REGION 1..9: note = Description of sequence: epitope presenting peptide
YVDNGPDGY

SEQ ID NO: 586 - protein, 9 aa, synthetic construct
  REGION 1..9: note = Description of sequence: epitope presenting peptide
FIDTKRGVY

SEQ ID NO: 587 - protein, 9 aa, synthetic construct
  REGION 1..9: note = Description of sequence: epitope presenting peptide
YTERSEKSY

SEQ ID NO: 588 - protein, 14 aa, synthetic construct
  REGION 1..14: note = Description of sequence: epitope presenting peptide
TSDLATNNLVVMAY

SEQ ID NO: 589 - protein, 9 aa, synthetic construct
  REGION 1..9: note = Description of sequence: epitope presenting peptide
TSDLATNAY

SEQ ID NO: 590 - protein, 11 aa, synthetic construct
  REGION 1..11: note = Description of sequence: epitope presenting peptide
HTDFSSEIIGY

SEQ ID NO: 591 - protein, 9 aa, synthetic construct
  REGION 1..9: note = Description of sequence: epitope presenting peptide
HTDFSSEIY

SEQ ID NO: 592 - protein, 9 aa, synthetic construct
  REGION 1..9: note = Description of sequence: epitope presenting peptide
FSAVGNICY

SEQ ID NO: 593 - protein, 10 aa, synthetic construct
  REGION 1..10: note = Description of sequence: epitope presenting peptide
FSNSGSDVLY

SEQ ID NO: 594 - protein, 9 aa, synthetic construct
  REGION 1..9: note = Description of sequence: epitope presenting peptide
FSNSGSDLY

SEQ ID NO: 595 - protein, 10 aa, synthetic construct
  REGION 1..10: note = Description of sequence: epitope presenting peptide
MADQAMTQMY

SEQ ID NO: 596 - protein, 14 aa, synthetic construct
  REGION 1..14: note = Description of sequence: epitope presenting peptide
NTYKNTCDGTTFTY

SEQ ID NO: 597 - protein, 9 aa, synthetic construct
  REGION 1..9: note = Description of sequence: epitope presenting peptide
NTDGTTFTY

SEQ ID NO: 598 - protein, 14 aa, synthetic construct
  REGION 1..14: note = Description of sequence: epitope presenting peptide
TTQTACTDDNALAY

SEQ ID NO: 599 - protein, 9 aa, synthetic construct
  REGION 1..9: note = Description of sequence: epitope presenting peptide
TTDDNALAY

SEQ ID NO: 600 - protein, 13 aa, synthetic construct
  REGION 1..13: note = Description of sequence: epitope presenting peptide
QTACTDDNALAYY

SEQ ID NO: 601 - protein, 9 aa, synthetic construct
  REGION 1..9: note = Description of sequence: epitope presenting peptide
QTDNALAYY

SEQ ID NO: 602 - protein, 10 aa, synthetic construct
  REGION 1..10: note = Description of sequence: epitope presenting peptide
CTDDNALAYY

SEQ ID NO: 603 - protein, 9 aa, synthetic construct
  REGION 1..9: note = Description of sequence: epitope presenting peptide
CTDDNALYY

SEQ ID NO: 604 - protein, 14 aa, synthetic construct
  REGION 1..14: note = Description of sequence: epitope presenting peptide
WARFPKSDGTGTIY

SEQ ID NO: 605 - protein, 14 aa, synthetic construct
  REGION 1..14: note = Description of sequence: epitope presenting peptide
VTDTPKGPKVKYLY

SEQ ID NO: 606 - protein, 9 aa, synthetic construct
  REGION 1..9: note = Description of sequence: epitope presenting peptide
VTDTPKYLY

SEQ ID NO: 607 - protein, 13 aa, synthetic construct
  REGION 1..13: note = Description of sequence: epitope presenting peptide
NTNSSPDDQIGYY

SEQ ID NO: 608 - protein, 10 aa, synthetic construct
  REGION 1..10: note = Description of sequence: epitope presenting peptide
YFTSDYYQLY

SEQ ID NO: 609 - protein, 14 aa, synthetic construct
  REGION 1..14: note = Description of sequence: epitope presenting peptide
STDTGVEHVTFFIY

SEQ ID NO: 610 - protein, 9 aa, synthetic construct
  REGION 1..9: note = Description of sequence: epitope presenting peptide
STDTGVEHY

SEQ ID NO: 611 - protein, 11 aa, synthetic construct
  REGION 1..11: note = Description of sequence: epitope presenting peptide
VVDDPCPIHFY

SEQ ID NO: 612 - protein, 10 aa, synthetic construct
  REGION 1..10: note = Description of sequence: epitope presenting peptide
TTDLSFLGRY

SEQ ID NO: 613 - protein, 8 aa, synthetic construct
  REGION 1..8: note = Description of sequence: epitope presenting peptide
LTENLLLY

SEQ ID NO: 614 - protein, 8 aa, synthetic construct
  REGION 1..8: note = Description of sequence: epitope presenting peptide
LTENLLLY

SEQ ID NO: 615 - protein, 14 aa, synthetic construct
  REGION 1..14: note = Description of sequence: epitope presenting peptide
ALRKVPTDNYITTY

SEQ ID NO: 616 - protein, 9 aa, synthetic construct
  REGION 1..9: note = Description of sequence: epitope presenting peptide
ATDNYITTY

SEQ ID NO: 617 - protein, 11 aa, synthetic construct
  REGION 1..11: note = Description of sequence: epitope presenting peptide
KVPTDNYITTY

SEQ ID NO: 618 - protein, 9 aa, synthetic construct
  REGION 1..9: note = Description of sequence: epitope presenting peptide
VVDYGARFY

SEQ ID NO: 619 - protein, 11 aa, synthetic construct
  REGION 1..11: note = Description of sequence: epitope presenting peptide
HTTDPSFLGRY

SEQ ID NO: 620 - protein, 9 aa, synthetic construct
  REGION 1..9: note = Description of sequence: epitope presenting peptide
TTDPSFLRY

SEQ ID NO: 621 - protein, 10 aa, synthetic construct
  REGION 1..10: note = Description of sequence: epitope presenting peptide
TTDPSFLGRY

SEQ ID NO: 622 - protein, 11 aa, synthetic construct
  REGION 1..11: note = Description of sequence: epitope presenting peptide
ITDVFYKENSY

SEQ ID NO: 623 - protein, 9 aa, synthetic construct
  REGION 1..9: note = Description of sequence: epitope presenting peptide
ITDYKENSY

SEQ ID NO: 624 - protein, 14 aa, synthetic construct
  REGION 1..14: note = Description of sequence: epitope presenting peptide
FTEQPIDLVPNQPY

SEQ ID NO: 625 - protein, 9 aa, synthetic construct
  REGION 1..9: note = Description of sequence: epitope presenting peptide
FTEQPIDLY

SEQ ID NO: 626 - protein, 11 aa, synthetic construct
  REGION 1..11: note = Description of sequence: epitope presenting peptide
FADDLNQLTGY

SEQ ID NO: 627 - protein, 9 aa, synthetic construct
  REGION 1..9: note = Description of sequence: epitope presenting peptide
FADDLNQLY

SEQ ID NO: 628 - protein, 14 aa, synthetic construct
  REGION 1..14: note = Description of sequence: epitope presenting peptide
ITEEVGHTDLMAAY

SEQ ID NO: 629 - protein, 9 aa, synthetic construct
  REGION 1..9: note = Description of sequence: epitope presenting peptide
ITEEVGHAY

SEQ ID NO: 630 - protein, 12 aa, synthetic construct
  REGION 1..12: note = Description of sequence: epitope presenting peptide
STDVVYRAFDIY

SEQ ID NO: 631 - protein, 9 aa, synthetic construct
  REGION 1..9: note = Description of sequence: epitope presenting peptide
STDRAFDIY

SEQ ID NO: 632 - protein, 11 aa, synthetic construct
  REGION 1..11: note = Description of sequence: epitope presenting peptide
FVENPDILRVY

SEQ ID NO: 633 - protein, 13 aa, synthetic construct
  REGION 1..13: note = Description of sequence: epitope presenting peptide
FVDGVPFVVSTGY

SEQ ID NO: 634 - protein, 10 aa, synthetic construct
  REGION 1..10: note = Description of sequence: epitope presenting peptide
AISDYDYYRY

SEQ ID NO: 635 - protein, 9 aa, synthetic construct
  REGION 1..9: note = Description of sequence: epitope presenting peptide
ASDYDYYRY

SEQ ID NO: 636 - protein, 9 aa, synthetic construct
  REGION 1..9: note = Description of sequence: epitope presenting peptide
VVDKYFDCY

SEQ ID NO: 637 - protein, 14 aa, synthetic construct
  REGION 1..14: note = Description of sequence: epitope presenting peptide
YSDVENPHLMGWDY

SEQ ID NO: 638 - protein, 9 aa, synthetic construct
  REGION 1..9: note = Description of sequence: epitope presenting peptide
YSDVENPHY

SEQ ID NO: 639 - protein, 12 aa, synthetic construct
  REGION 1..12: note = Description of sequence: epitope presenting peptide
LSEMVMCGGSLY

SEQ ID NO: 640 - protein, 11 aa, synthetic construct
  REGION 1..11: note = Description of sequence: epitope presenting peptide
STDGNKIADKY

SEQ ID NO: 641 - protein, 9 aa, synthetic construct
  REGION 1..9: note = Description of sequence: epitope presenting peptide
STDGIADKY

SEQ ID NO: 642 - protein, 13 aa, synthetic construct
  REGION 1..13: note = Description of sequence: epitope presenting peptide
NRDVDTDFVNEFY

SEQ ID NO: 643 - protein, 9 aa, synthetic construct
  REGION 1..9: note = Description of sequence: epitope presenting peptide
NTDFVNEFY

SEQ ID NO: 644 - protein, 11 aa, synthetic construct
  REGION 1..11: note = Description of sequence: epitope presenting peptide
DTDFVNEFYAY

SEQ ID NO: 645 - protein, 13 aa, synthetic construct
  REGION 1..13: note = Description of sequence: epitope presenting peptide
LSDDAVVCFNSTY

SEQ ID NO: 646 - protein, 9 aa, synthetic construct
  REGION 1..9: note = Description of sequence: epitope presenting peptide
LSDDANSTY

SEQ ID NO: 647 - protein, 8 aa, synthetic construct
  REGION 1..8: note = Description of sequence: epitope presenting peptide
YADVFHLY

SEQ ID NO: 648 - protein, 8 aa, synthetic construct
  REGION 1..8: note = Description of sequence: epitope presenting peptide
YADVFHLY

SEQ ID NO: 649 - protein, 13 aa, synthetic construct
  REGION 1..13: note = Description of sequence: epitope presenting peptide
YSVMLTNDNTSRY

SEQ ID NO: 650 - protein, 9 aa, synthetic construct
  REGION 1..9: note = Description of sequence: epitope presenting peptide
YTNDNTSRY

SEQ ID NO: 651 - protein, 9 aa, synthetic construct
  REGION 1..9: note = Description of sequence: epitope presenting peptide
TSNQVAVLY

SEQ ID NO: 652 - protein, 10 aa, synthetic construct
  REGION 1..10: note = Description of sequence: epitope presenting peptide
LADAGFIKQY

SEQ ID NO: 653 - protein, 9 aa, synthetic construct
  REGION 1..9: note = Description of sequence: epitope presenting peptide
LADAGFIQY

SEQ ID NO: 654 - protein, 14 aa, synthetic construct
  REGION 1..14: note = Description of sequence: epitope presenting peptide
VLPPLLTDEMIAQY

SEQ ID NO: 655 - protein, 9 aa, synthetic construct
  REGION 1..9: note = Description of sequence: epitope presenting peptide
VTDEMIAQY

SEQ ID NO: 656 - protein, 10 aa, synthetic construct
  REGION 1..10: note = Description of sequence: epitope presenting peptide
FLVQAGNVQL

SEQ ID NO: 657 - protein, 9 aa, synthetic construct
  REGION 1..9: note = Description of sequence: epitope presenting peptide
FLVAGNVQL

SEQ ID NO: 658 - protein, 9 aa, synthetic construct
  REGION 1..9: note = Description of sequence: epitope presenting peptide
FLNRFTTTL

SEQ ID NO: 659 - protein, 12 aa, synthetic construct
  REGION 1..12: note = Description of sequence: epitope presenting peptide
ALLEDEFTPFDV

SEQ ID NO: 660 - protein, 9 aa, synthetic construct
  REGION 1..9: note = Description of sequence: epitope presenting peptide
ALLEDEFTV

SEQ ID NO: 661 - protein, 9 aa, synthetic construct
  REGION 1..9: note = Description of sequence: epitope presenting peptide
SLVKPSFYV

SEQ ID NO: 662 - protein, 9 aa, synthetic construct
  REGION 1..9: note = Description of sequence: epitope presenting peptide
KLSYGIATV

SEQ ID NO: 663 - protein, 9 aa, synthetic construct
  REGION 1..9: note = Description of sequence: epitope presenting peptide
TLVPQEHYV

SEQ ID NO: 664 - protein, 9 aa, synthetic construct
  REGION 1..9: note = Description of sequence: epitope presenting peptide
KLLEQWNLV

SEQ ID NO: 665 - protein, 9 aa, synthetic construct
  REGION 1..9: note = Description of sequence: epitope presenting peptide
GLVEVEKGV

SEQ ID NO: 666 - protein, 9 aa, synthetic construct
  REGION 1..9: note = Description of sequence: epitope presenting peptide
VMVELVAEL

SEQ ID NO: 667 - protein, 9 aa, synthetic construct
  REGION 1..9: note = Description of sequence: epitope presenting peptide
TLGVLVPHV

SEQ ID NO: 668 - protein, 9 aa, synthetic construct
  REGION 1..9: note = Description of sequence: epitope presenting peptide
YLASGGQPI

SEQ ID NO: 669 - protein, 9 aa, synthetic construct
  REGION 1..9: note = Description of sequence: epitope presenting peptide
MLSDTLKNL

SEQ ID NO: 670 - protein, 9 aa, synthetic construct
  REGION 1..9: note = Description of sequence: epitope presenting peptide
NLSDRVVFV

SEQ ID NO: 671 - protein, 9 aa, synthetic construct
  REGION 1..9: note = Description of sequence: epitope presenting peptide
VLWAHGFEL

SEQ ID NO: 672 - protein, 9 aa, synthetic construct
  REGION 1..9: note = Description of sequence: epitope presenting peptide
LLADKFPVL

SEQ ID NO: 673 - protein, 9 aa, synthetic construct
  REGION 1..9: note = Description of sequence: epitope presenting peptide
YLDAYNMMI

SEQ ID NO: 674 - protein, 9 aa, synthetic construct
  REGION 1..9: note = Description of sequence: epitope presenting peptide
MMISAGFSL

SEQ ID NO: 675 - protein, 9 aa, synthetic construct
  REGION 1..9: note = Description of sequence: epitope presenting peptide
SLENVAFNV

SEQ ID NO: 676 - protein, 9 aa, synthetic construct
  REGION 1..9: note = Description of sequence: epitope presenting peptide
SQLGGLHLL

SEQ ID NO: 677 - protein, 10 aa, synthetic construct
  REGION 1..10: note = Description of sequence: epitope presenting peptide
LLLDDFVEII

SEQ ID NO: 678 - protein, 9 aa, synthetic construct
  REGION 1..9: note = Description of sequence: epitope presenting peptide
LLLDDFVEI

SEQ ID NO: 679 - protein, 9 aa, synthetic construct
  REGION 1..9: note = Description of sequence: epitope presenting peptide
YLNTLTLAV

SEQ ID NO: 680 - protein, 9 aa, synthetic construct
  REGION 1..9: note = Description of sequence: epitope presenting peptide
TLIGDCATV

SEQ ID NO: 681 - protein, 12 aa, synthetic construct
  REGION 1..12: note = Description of sequence: epitope presenting peptide
SLFDMSKFPLKL

SEQ ID NO: 682 - protein, 9 aa, synthetic construct
  REGION 1..9: note = Description of sequence: epitope presenting peptide
SLFDFPLKL

SEQ ID NO: 683 - protein, 10 aa, synthetic construct
  REGION 1..10: note = Description of sequence: epitope presenting peptide
GLNDNLLEIL

SEQ ID NO: 684 - protein, 9 aa, synthetic construct
  REGION 1..9: note = Description of sequence: epitope presenting peptide
GLNDNLLEL

SEQ ID NO: 685 - protein, 9 aa, synthetic construct
  REGION 1..9: note = Description of sequence: epitope presenting peptide
KLNEEIAII

SEQ ID NO: 686 - protein, 9 aa, synthetic construct
  REGION 1..9: note = Description of sequence: epitope presenting peptide
RLIDAMMFT

SEQ ID NO: 687 - protein, 9 aa, synthetic construct
  REGION 1..9: note = Description of sequence: epitope presenting peptide
YITGGVVQL

SEQ ID NO: 688 - protein, 9 aa, synthetic construct
  REGION 1..9: note = Description of sequence: epitope presenting peptide
KLVNKFLAL

SEQ ID NO: 689 - protein, 9 aa, synthetic construct
  REGION 1..9: note = Description of sequence: epitope presenting peptide
ALNLGETFV

SEQ ID NO: 690 - protein, 9 aa, synthetic construct
  REGION 1..9: note = Description of sequence: epitope presenting peptide
YLITPVHVM

SEQ ID NO: 691 - protein, 9 aa, synthetic construct
  REGION 1..9: note = Description of sequence: epitope presenting peptide
FLPRVFSAV

SEQ ID NO: 692 - protein, 9 aa, synthetic construct
  REGION 1..9: note = Description of sequence: epitope presenting peptide
KLIEYTDFA

SEQ ID NO: 693 - protein, 9 aa, synthetic construct
  REGION 1..9: note = Description of sequence: epitope presenting peptide
IVAGGIVAI

SEQ ID NO: 694 - protein, 9 aa, synthetic construct
  REGION 1..9: note = Description of sequence: epitope presenting peptide
FLAHIQWMV

SEQ ID NO: 695 - protein, 9 aa, synthetic construct
  REGION 1..9: note = Description of sequence: epitope presenting peptide
FLLNKEMYL

SEQ ID NO: 696 - protein, 9 aa, synthetic construct
  REGION 1..9: note = Description of sequence: epitope presenting peptide
ILTSLLVLV

SEQ ID NO: 697 - protein, 9 aa, synthetic construct
  REGION 1..9: note = Description of sequence: epitope presenting peptide
WLDMVDTSL

SEQ ID NO: 698 - protein, 9 aa, synthetic construct
  REGION 1..9: note = Description of sequence: epitope presenting peptide
VLLSVLQQL

SEQ ID NO: 699 - protein, 9 aa, synthetic construct
  REGION 1..9: note = Description of sequence: epitope presenting peptide
KLWAQCVQL

SEQ ID NO: 700 - protein, 9 aa, synthetic construct
  REGION 1..9: note = Description of sequence: epitope presenting peptide
ALWEIQQVV

SEQ ID NO: 701 - protein, 9 aa, synthetic construct
  REGION 1..9: note = Description of sequence: epitope presenting peptide
ALLSDLQDL

SEQ ID NO: 702 - protein, 9 aa, synthetic construct
  REGION 1..9: note = Description of sequence: epitope presenting peptide
NVFAFPFTI

SEQ ID NO: 703 - protein, 9 aa, synthetic construct
  REGION 1..9: note = Description of sequence: epitope presenting peptide
ALSKGVHFV

SEQ ID NO: 704 - protein, 9 aa, synthetic construct
  REGION 1..9: note = Description of sequence: epitope presenting peptide
TVYSHLLLV

SEQ ID NO: 705 - protein, 9 aa, synthetic construct
  REGION 1..9: note = Description of sequence: epitope presenting peptide
YLYALVYFL

SEQ ID NO: 706 - protein, 9 aa, synthetic construct
  REGION 1..9: note = Description of sequence: epitope presenting peptide
LLYDANYFL

SEQ ID NO: 707 - protein, 9 aa, synthetic construct
  REGION 1..9: note = Description of sequence: epitope presenting peptide
HLVDFQVTI

SEQ ID NO: 708 - protein, 9 aa, synthetic construct
  REGION 1..9: note = Description of sequence: epitope presenting peptide
KLFIRQEEV

SEQ ID NO: 709 - protein, 11 aa, synthetic construct
  REGION 1..11: note = Description of sequence: epitope presenting peptide
YLFDESGDFKL

SEQ ID NO: 710 - protein, 11 aa, synthetic construct
  REGION 1..11: note = Description of sequence: epitope presenting peptide
YLKLTDNVYIK

SEQ ID NO: 711 - protein, 9 aa, synthetic construct
  REGION 1..9: note = Description of sequence: epitope presenting peptide
FLKKDAPYI

SEQ ID NO: 712 - protein, 9 aa, synthetic construct
  REGION 1..9: note = Description of sequence: epitope presenting peptide
TLNDLNETL

SEQ ID NO: 713 - protein, 10 aa, synthetic construct
  REGION 1..10: note = Description of sequence: epitope presenting peptide
YLDGADVTKI

SEQ ID NO: 714 - protein, 9 aa, synthetic construct
  REGION 1..9: note = Description of sequence: epitope presenting peptide
YLDGADVTI

SEQ ID NO: 715 - protein, 9 aa, synthetic construct
  REGION 1..9: note = Description of sequence: epitope presenting peptide
YLATALLTL

SEQ ID NO: 716 - protein, 9 aa, synthetic construct
  REGION 1..9: note = Description of sequence: epitope presenting peptide
YLNSTNVTI

SEQ ID NO: 717 - protein, 11 aa, synthetic construct
  REGION 1..11: note = Description of sequence: epitope presenting peptide
QMAPISAMVRM

SEQ ID NO: 718 - protein, 9 aa, synthetic construct
  REGION 1..9: note = Description of sequence: epitope presenting peptide
YVWKSYVHV

SEQ ID NO: 719 - protein, 9 aa, synthetic construct
  REGION 1..9: note = Description of sequence: epitope presenting peptide
NLIDSYFVV

SEQ ID NO: 720 - protein, 10 aa, synthetic construct
  REGION 1..10: note = Description of sequence: epitope presenting peptide
YTMADLVYAL

SEQ ID NO: 721 - protein, 9 aa, synthetic construct
  REGION 1..9: note = Description of sequence: epitope presenting peptide
YMADLVYAL

SEQ ID NO: 722 - protein, 9 aa, synthetic construct
  REGION 1..9: note = Description of sequence: epitope presenting peptide
SLLMPILTL

SEQ ID NO: 723 - protein, 10 aa, synthetic construct
  REGION 1..10: note = Description of sequence: epitope presenting peptide
KIFVDGVPFV

SEQ ID NO: 724 - protein, 9 aa, synthetic construct
  REGION 1..9: note = Description of sequence: epitope presenting peptide
KIFDGVPFV

SEQ ID NO: 725 - protein, 9 aa, synthetic construct
  REGION 1..9: note = Description of sequence: epitope presenting peptide
RLANECAQV

SEQ ID NO: 726 - protein, 11 aa, synthetic construct
  REGION 1..11: note = Description of sequence: epitope presenting peptide
YLPYPDPSRIL

SEQ ID NO: 727 - protein, 9 aa, synthetic construct
  REGION 1..9: note = Description of sequence: epitope presenting peptide
LMIERFVSL

SEQ ID NO: 728 - protein, 9 aa, synthetic construct
  REGION 1..9: note = Description of sequence: epitope presenting peptide
MLDMYSVML

SEQ ID NO: 729 - protein, 9 aa, synthetic construct
  REGION 1..9: note = Description of sequence: epitope presenting peptide
VSPTKLNDL

SEQ ID NO: 730 - protein, 9 aa, synthetic construct
  REGION 1..9: note = Description of sequence: epitope presenting peptide
FKNHTSPDV

SEQ ID NO: 731 - protein, 9 aa, synthetic construct
  REGION 1..9: note = Description of sequence: epitope presenting peptide
AMRPNFTIK

SEQ ID NO: 732 - protein, 9 aa, synthetic construct
  REGION 1..9: note = Description of sequence: epitope presenting peptide
KLFAAETLK

SEQ ID NO: 733 - protein, 10 aa, synthetic construct
  REGION 1..10: note = Description of sequence: epitope presenting peptide
YVFTGYRVTK

SEQ ID NO: 734 - protein, 10 aa, synthetic construct
  REGION 1..10: note = Description of sequence: epitope presenting peptide
VVYRGTTTYK

SEQ ID NO: 735 - protein, 9 aa, synthetic construct
  REGION 1..9: note = Description of sequence: epitope presenting peptide
ALKYLPIDK

SEQ ID NO: 736 - protein, 9 aa, synthetic construct
  REGION 1..9: note = Description of sequence: epitope presenting peptide
VVNARLRAK

SEQ ID NO: 737 - protein, 9 aa, synthetic construct
  REGION 1..9: note = Description of sequence: epitope presenting peptide
RIAGHHLGR

SEQ ID NO: 738 - protein, 9 aa, synthetic construct
  REGION 1..9: note = Description of sequence: epitope presenting peptide
SLVPGFNEK

SEQ ID NO: 739 - protein, 9 aa, synthetic construct
  REGION 1..9: note = Description of sequence: epitope presenting peptide
RLISMMGFK

SEQ ID NO: 740 - protein, 9 aa, synthetic construct
  REGION 1..9: note = Description of sequence: epitope presenting peptide
SMMGFKMNY

SEQ ID NO: 741 - protein, 9 aa, synthetic construct
  REGION 1..9: note = Description of sequence: epitope presenting peptide
VLHDIGNPK

SEQ ID NO: 742 - protein, 10 aa, synthetic construct
  REGION 1..10: note = Description of sequence: epitope presenting peptide
SIINNTVYTK

SEQ ID NO: 743 - protein, 9 aa, synthetic construct
  REGION 1..9: note = Description of sequence: epitope presenting peptide
GLQPSVGPK

SEQ ID NO: 744 - protein, 10 aa, synthetic construct
  REGION 1..10: note = Description of sequence: epitope presenting peptide
GVAMPNLYKM

SEQ ID NO: 745 - protein, 9 aa, synthetic construct
  REGION 1..9: note = Description of sequence: epitope presenting peptide
KMQRMLLEK

SEQ ID NO: 746 - protein, 9 aa, synthetic construct
  REGION 1..9: note = Description of sequence: epitope presenting peptide
ALGGSVAIK

SEQ ID NO: 747 - protein, 10 aa, synthetic construct
  REGION 1..10: note = Description of sequence: epitope presenting peptide
KTIQPRVEKK

SEQ ID NO: 748 - protein, 9 aa, synthetic construct
  REGION 1..9: note = Description of sequence: epitope presenting peptide
KVTKGKAKK

SEQ ID NO: 749 - protein, 9 aa, synthetic construct
  REGION 1..9: note = Description of sequence: epitope presenting peptide
NIFGTVYEK

SEQ ID NO: 750 - protein, 9 aa, synthetic construct
  REGION 1..9: note = Description of sequence: epitope presenting peptide
IIIGGAKLK

SEQ ID NO: 751 - protein, 9 aa, synthetic construct
  REGION 1..9: note = Description of sequence: epitope presenting peptide
VTNNTFTLK

SEQ ID NO: 752 - protein, 9 aa, synthetic construct
  REGION 1..9: note = Description of sequence: epitope presenting peptide
TLKGGAPTK

SEQ ID NO: 753 - protein, 9 aa, synthetic construct
  REGION 1..9: note = Description of sequence: epitope presenting peptide
TIFKDASGK

SEQ ID NO: 754 - protein, 9 aa, synthetic construct
  REGION 1..9: note = Description of sequence: epitope presenting peptide
ALCTFLLNK

SEQ ID NO: 755 - protein, 10 aa, synthetic construct
  REGION 1..10: note = Description of sequence: epitope presenting peptide
SMQGAVDINK

SEQ ID NO: 756 - protein, 9 aa, synthetic construct
  REGION 1..9: note = Description of sequence: epitope presenting peptide
SMQGAVINK

SEQ ID NO: 757 - protein, 10 aa, synthetic construct
  REGION 1..10: note = Description of sequence: epitope presenting peptide
KLKKSLNVAK

SEQ ID NO: 758 - protein, 9 aa, synthetic construct
  REGION 1..9: note = Description of sequence: epitope presenting peptide
KLKKSLVAK

SEQ ID NO: 759 - protein, 9 aa, synthetic construct
  REGION 1..9: note = Description of sequence: epitope presenting peptide
TMLFTMLRK

SEQ ID NO: 760 - protein, 10 aa, synthetic construct
  REGION 1..10: note = Description of sequence: epitope presenting peptide
VVIPDYNTYK

SEQ ID NO: 761 - protein, 9 aa, synthetic construct
  REGION 1..9: note = Description of sequence: epitope presenting peptide
ALRANSAVK

SEQ ID NO: 762 - protein, 9 aa, synthetic construct
  REGION 1..9: note = Description of sequence: epitope presenting peptide
ALAYYNTTK

SEQ ID NO: 763 - protein, 11 aa, synthetic construct
  REGION 1..11: note = Description of sequence: epitope presenting peptide
RIFTIGTVTLK

SEQ ID NO: 764 - protein, 9 aa, synthetic construct
  REGION 1..9: note = Description of sequence: epitope presenting peptide
SASKIITLK

SEQ ID NO: 765 - protein, 9 aa, synthetic construct
  REGION 1..9: note = Description of sequence: epitope presenting peptide
ASKIITLKK

SEQ ID NO: 766 - protein, 9 aa, synthetic construct
  REGION 1..9: note = Description of sequence: epitope presenting peptide
TVIEVQGYK

SEQ ID NO: 767 - protein, 9 aa, synthetic construct
  REGION 1..9: note = Description of sequence: epitope presenting peptide
RIDKVLNEK

SEQ ID NO: 768 - protein, 9 aa, synthetic construct
  REGION 1..9: note = Description of sequence: epitope presenting peptide
VLSGHNLAK

SEQ ID NO: 769 - protein, 9 aa, synthetic construct
  REGION 1..9: note = Description of sequence: epitope presenting peptide
HVVGPNVNK

SEQ ID NO: 770 - protein, 10 aa, synthetic construct
  REGION 1..10: note = Description of sequence: epitope presenting peptide
AVFDKNLYDK

SEQ ID NO: 771 - protein, 10 aa, synthetic construct
  REGION 1..10: note = Description of sequence: epitope presenting peptide
KLMPVCVETK

SEQ ID NO: 772 - protein, 9 aa, synthetic construct
  REGION 1..9: note = Description of sequence: epitope presenting peptide
KLMPVVETK

SEQ ID NO: 773 - protein, 9 aa, synthetic construct
  REGION 1..9: note = Description of sequence: epitope presenting peptide
AIVSTIQRK

SEQ ID NO: 774 - protein, 9 aa, synthetic construct
  REGION 1..9: note = Description of sequence: epitope presenting peptide
TISLAGSYK

SEQ ID NO: 775 - protein, 10 aa, synthetic construct
  REGION 1..10: note = Description of sequence: epitope presenting peptide
AVMYMGTLSY

SEQ ID NO: 776 - protein, 9 aa, synthetic construct
  REGION 1..9: note = Description of sequence: epitope presenting peptide
AVYMGTLSY

SEQ ID NO: 777 - protein, 9 aa, synthetic construct
  REGION 1..9: note = Description of sequence: epitope presenting peptide
VVENPTIQK

SEQ ID NO: 778 - protein, 10 aa, synthetic construct
  REGION 1..10: note = Description of sequence: epitope presenting peptide
KASMPTTIAK

SEQ ID NO: 779 - protein, 9 aa, synthetic construct
  REGION 1..9: note = Description of sequence: epitope presenting peptide
ATAEAELAK

SEQ ID NO: 780 - protein, 10 aa, synthetic construct
  REGION 1..10: note = Description of sequence: epitope presenting peptide
RQVVNVVTTK

SEQ ID NO: 781 - protein, 9 aa, synthetic construct
  REGION 1..9: note = Description of sequence: epitope presenting peptide
VVTTKIALK

SEQ ID NO: 782 - protein, 10 aa, synthetic construct
  REGION 1..10: note = Description of sequence: epitope presenting peptide
KVAGFAKFLK

SEQ ID NO: 783 - protein, 10 aa, synthetic construct
  REGION 1..10: note = Description of sequence: epitope presenting peptide
LLKDCPAVAK

SEQ ID NO: 784 - protein, 9 aa, synthetic construct
  REGION 1..9: note = Description of sequence: epitope presenting peptide
LLKDPAVAK

SEQ ID NO: 785 - protein, 9 aa, synthetic construct
  REGION 1..9: note = Description of sequence: epitope presenting peptide
AVAKHDFFK

SEQ ID NO: 786 - protein, 9 aa, synthetic construct
  REGION 1..9: note = Description of sequence: epitope presenting peptide
RVYANLGER

SEQ ID NO: 787 - protein, 9 aa, synthetic construct
  REGION 1..9: note = Description of sequence: epitope presenting peptide
KLFDRYFKY

SEQ ID NO: 788 - protein, 14 aa, synthetic construct
  REGION 1..14: note = Description of sequence: epitope presenting peptide
TVFPPTSFGPLVRK

SEQ ID NO: 789 - protein, 9 aa, synthetic construct
  REGION 1..9: note = Description of sequence: epitope presenting peptide
TSFGPLVRK

SEQ ID NO: 790 - protein, 9 aa, synthetic construct
  REGION 1..9: note = Description of sequence: epitope presenting peptide
TVKPGNFNK

SEQ ID NO: 791 - protein, 9 aa, synthetic construct
  REGION 1..9: note = Description of sequence: epitope presenting peptide
KSAGFPFNK

SEQ ID NO: 792 - protein, 9 aa, synthetic construct
  REGION 1..9: note = Description of sequence: epitope presenting peptide
RLYYDSMSY

SEQ ID NO: 793 - protein, 12 aa, synthetic construct
  REGION 1..12: note = Description of sequence: epitope presenting peptide
MTNRQFHQKLLK

SEQ ID NO: 794 - protein, 9 aa, synthetic construct
  REGION 1..9: note = Description of sequence: epitope presenting peptide
ATVVIGTSK

SEQ ID NO: 795 - protein, 9 aa, synthetic construct
  REGION 1..9: note = Description of sequence: epitope presenting peptide
LVASIKNFK

SEQ ID NO: 796 - protein, 9 aa, synthetic construct
  REGION 1..9: note = Description of sequence: epitope presenting peptide
AIDAYPLTK

SEQ ID NO: 797 - protein, 9 aa, synthetic construct
  REGION 1..9: note = Description of sequence: epitope presenting peptide
KVFRSSVLH

SEQ ID NO: 798 - protein, 9 aa, synthetic construct
  REGION 1..9: note = Description of sequence: epitope presenting peptide
TLKSFTVEK

SEQ ID NO: 799 - protein, 10 aa, synthetic construct
  REGION 1..10: note = Description of sequence: epitope presenting peptide
RQIAPGQTGK

SEQ ID NO: 800 - protein, 9 aa, synthetic construct
  REGION 1..9: note = Description of sequence: epitope presenting peptide
RIAPGQTGK

SEQ ID NO: 801 - protein, 9 aa, synthetic construct
  REGION 1..9: note = Description of sequence: epitope presenting peptide
RLFRKSNLK

SEQ ID NO: 802 - protein, 10 aa, synthetic construct
  REGION 1..10: note = Description of sequence: epitope presenting peptide
KQIYKTPPIK

SEQ ID NO: 803 - protein, 9 aa, synthetic construct
  REGION 1..9: note = Description of sequence: epitope presenting peptide
KIYKTPPIK

SEQ ID NO: 804 - protein, 9 aa, synthetic construct
  REGION 1..9: note = Description of sequence: epitope presenting peptide
TLADAGFIK

SEQ ID NO: 805 - protein, 9 aa, synthetic construct
  REGION 1..9: note = Description of sequence: epitope presenting peptide
VTYVPAQEK

SEQ ID NO: 806 - protein, 10 aa, synthetic construct
  REGION 1..10: note = Description of sequence: epitope presenting peptide
AVLDMCASLK

SEQ ID NO: 807 - protein, 9 aa, synthetic construct
  REGION 1..9: note = Description of sequence: epitope presenting peptide
VTFQSAVKR

SEQ ID NO: 808 - protein, 9 aa, synthetic construct
  REGION 1..9: note = Description of sequence: epitope presenting peptide
SSNVANYQK

SEQ ID NO: 809 - protein, 11 aa, synthetic construct
  REGION 1..11: note = Description of sequence: epitope presenting peptide
STLQGPPGTGK

SEQ ID NO: 810 - protein, 9 aa, synthetic construct
  REGION 1..9: note = Description of sequence: epitope presenting peptide
GTITVEELK

SEQ ID NO: 811 - protein, 10 aa, synthetic construct
  REGION 1..10: note = Description of sequence: epitope presenting peptide
ATSRTLSYYK

SEQ ID NO: 812 - protein, 9 aa, synthetic construct
  REGION 1..9: note = Description of sequence: epitope presenting peptide
ASCDAIMTR

SEQ ID NO: 813 - protein, 9 aa, synthetic construct
  REGION 1..9: note = Description of sequence: epitope presenting peptide
KTQFNYYKK

SEQ ID NO: 814 - protein, 9 aa, synthetic construct
  REGION 1..9: note = Description of sequence: epitope presenting peptide
HSWNADLYK

SEQ ID NO: 815 - protein, 10 aa, synthetic construct
  REGION 1..10: note = Description of sequence: epitope presenting peptide
SSYSLFDMSK

SEQ ID NO: 816 - protein, 10 aa, synthetic construct
  REGION 1..10: note = Description of sequence: epitope presenting peptide
STSAFVETVK

SEQ ID NO: 817 - protein, 9 aa, synthetic construct
  REGION 1..9: note = Description of sequence: epitope presenting peptide
STSAFVTVK

SEQ ID NO: 818 - protein, 9 aa, synthetic construct
  REGION 1..9: note = Description of sequence: epitope presenting peptide
RVVRSIFSR

SEQ ID NO: 819 - protein, 9 aa, synthetic construct
  REGION 1..9: note = Description of sequence: epitope presenting peptide
GAMDTTSYR

SEQ ID NO: 820 - protein, 10 aa, synthetic construct
  REGION 1..10: note = Description of sequence: epitope presenting peptide
SAVLQSGFRK

SEQ ID NO: 821 - protein, 9 aa, synthetic construct
  REGION 1..9: note = Description of sequence: epitope presenting peptide
SAFAMMFVK

SEQ ID NO: 822 - protein, 12 aa, synthetic construct
  REGION 1..12: note = Description of sequence: epitope presenting peptide
AVANGDSEVVLK

SEQ ID NO: 823 - protein, 9 aa, synthetic construct
  REGION 1..9: note = Description of sequence: epitope presenting peptide
AVANGVVLK

SEQ ID NO: 824 - protein, 9 aa, synthetic construct
  REGION 1..9: note = Description of sequence: epitope presenting peptide
QTMLFTMLR

SEQ ID NO: 825 - protein, 9 aa, synthetic construct
  REGION 1..9: note = Description of sequence: epitope presenting peptide
ASAFFGMSR

SEQ ID NO: 826 - protein, 11 aa, synthetic construct
  REGION 1..11: note = Description of sequence: epitope presenting peptide
AYKTFPPTEPK

SEQ ID NO: 827 - protein, 10 aa, synthetic construct
  REGION 1..10: note = Description of sequence: epitope presenting peptide
VVNAANVYLK

SEQ ID NO: 828 - protein, 9 aa, synthetic construct
  REGION 1..9: note = Description of sequence: epitope presenting peptide
VVNAANVYK

SEQ ID NO: 829 - protein, 11 aa, synthetic construct
  REGION 1..11: note = Description of sequence: epitope presenting peptide
LVSDIDITFLK

SEQ ID NO: 830 - protein, 9 aa, synthetic construct
  REGION 1..9: note = Description of sequence: epitope presenting peptide
LTAVVIPTK

SEQ ID NO: 831 - protein, 10 aa, synthetic construct
  REGION 1..10: note = Description of sequence: epitope presenting peptide
STQLGIEFLK

SEQ ID NO: 832 - protein, 9 aa, synthetic construct
  REGION 1..9: note = Description of sequence: epitope presenting peptide
STLGIEFLK

SEQ ID NO: 833 - protein, 9 aa, synthetic construct
  REGION 1..9: note = Description of sequence: epitope presenting peptide
GTLSYEQFK

SEQ ID NO: 834 - protein, 12 aa, synthetic construct
  REGION 1..12: note = Description of sequence: epitope presenting peptide
SYTTTIKPVTYK

SEQ ID NO: 835 - protein, 9 aa, synthetic construct
  REGION 1..9: note = Description of sequence: epitope presenting peptide
TSNSFDVLK

SEQ ID NO: 836 - protein, 9 aa, synthetic construct
  REGION 1..9: note = Description of sequence: epitope presenting peptide
TTIAKNTVK

SEQ ID NO: 837 - protein, 13 aa, synthetic construct
  REGION 1..13: note = Description of sequence: epitope presenting peptide
ASFNYLKSPNFSK

SEQ ID NO: 838 - protein, 12 aa, synthetic construct
  REGION 1..12: note = Description of sequence: epitope presenting peptide
SSTFNVPMEKLK

SEQ ID NO: 839 - protein, 9 aa, synthetic construct
  REGION 1..9: note = Description of sequence: epitope presenting peptide
GTSTDVVYR

SEQ ID NO: 840 - protein, 9 aa, synthetic construct
  REGION 1..9: note = Description of sequence: epitope presenting peptide
RAFDIYNDK

SEQ ID NO: 841 - protein, 9 aa, synthetic construct
  REGION 1..9: note = Description of sequence: epitope presenting peptide
NSASFSTFK

SEQ ID NO: 842 - protein, 10 aa, synthetic construct
  REGION 1..10: note = Description of sequence: epitope presenting peptide
TEILPVSMTK

SEQ ID NO: 843 - protein, 9 aa, synthetic construct
  REGION 1..9: note = Description of sequence: epitope presenting peptide
TILPVSMTK

SEQ ID NO: 844 - protein, 9 aa, synthetic construct
  REGION 1..9: note = Description of sequence: epitope presenting peptide
SSTASALGK

SEQ ID NO: 845 - protein, 13 aa, synthetic construct
  REGION 1..13: note = Description of sequence: epitope presenting peptide
KYKFVRIQPGQTF

SEQ ID NO: 846 - protein, 13 aa, synthetic construct
  REGION 1..13: note = Description of sequence: epitope presenting peptide
SYYCKSHKPPISF

SEQ ID NO: 847 - protein, 11 aa, synthetic construct
  REGION 1..11: note = Description of sequence: epitope presenting peptide
TYKLNVGDYFV

SEQ ID NO: 848 - protein, 9 aa, synthetic construct
  REGION 1..9: note = Description of sequence: epitope presenting peptide
VYIGDPAQL

SEQ ID NO: 849 - protein, 10 aa, synthetic construct
  REGION 1..10: note = Description of sequence: epitope presenting peptide
SYFIASFRLF

SEQ ID NO: 850 - protein, 9 aa, synthetic construct
  REGION 1..9: note = Description of sequence: epitope presenting peptide
SYGADLKSF

SEQ ID NO: 851 - protein, 9 aa, synthetic construct
  REGION 1..9: note = Description of sequence: epitope presenting peptide
VFVLWAHGF

SEQ ID NO: 852 - protein, 9 aa, synthetic construct
  REGION 1..9: note = Description of sequence: epitope presenting peptide
SYATHSDKF

SEQ ID NO: 853 - protein, 9 aa, synthetic construct
  REGION 1..9: note = Description of sequence: epitope presenting peptide
KFTDGVCLF

SEQ ID NO: 854 - protein, 9 aa, synthetic construct
  REGION 1..9: note = Description of sequence: epitope presenting peptide
LYLDAYNMM

SEQ ID NO: 855 - protein, 11 aa, synthetic construct
  REGION 1..11: note = Description of sequence: epitope presenting peptide
VYKQFDTYNLW

SEQ ID NO: 856 - protein, 14 aa, synthetic construct
  REGION 1..14: note = Description of sequence: epitope presenting peptide
VFFDGRVDGQVDLF

SEQ ID NO: 857 - protein, 9 aa, synthetic construct
  REGION 1..9: note = Description of sequence: epitope presenting peptide
VFFDGRVLF

SEQ ID NO: 858 - protein, 9 aa, synthetic construct
  REGION 1..9: note = Description of sequence: epitope presenting peptide
RYKLEGYAF

SEQ ID NO: 859 - protein, 9 aa, synthetic construct
  REGION 1..9: note = Description of sequence: epitope presenting peptide
TFFKLVNKF

SEQ ID NO: 860 - protein, 9 aa, synthetic construct
  REGION 1..9: note = Description of sequence: epitope presenting peptide
VFLFVAAIF

SEQ ID NO: 861 - protein, 13 aa, synthetic construct
  REGION 1..13: note = Description of sequence: epitope presenting peptide
TYLEGSVRVVTTF

SEQ ID NO: 862 - protein, 9 aa, synthetic construct
  REGION 1..9: note = Description of sequence: epitope presenting peptide
YYRSLPGVF

SEQ ID NO: 863 - protein, 10 aa, synthetic construct
  REGION 1..10: note = Description of sequence: epitope presenting peptide
GVYSVIYLYL

SEQ ID NO: 864 - protein, 11 aa, synthetic construct
  REGION 1..11: note = Description of sequence: epitope presenting peptide
TFYLTNDVSFL

SEQ ID NO: 865 - protein, 9 aa, synthetic construct
  REGION 1..9: note = Description of sequence: epitope presenting peptide
MFTPLVPFW

SEQ ID NO: 866 - protein, 10 aa, synthetic construct
  REGION 1..10: note = Description of sequence: epitope presenting peptide
VFNGVSFSTF

SEQ ID NO: 867 - protein, 9 aa, synthetic construct
  REGION 1..9: note = Description of sequence: epitope presenting peptide
LYQPPQTSI

SEQ ID NO: 868 - protein, 14 aa, synthetic construct
  REGION 1..14: note = Description of sequence: epitope presenting peptide
VYMPASWVMRIMTW

SEQ ID NO: 869 - protein, 9 aa, synthetic construct
  REGION 1..9: note = Description of sequence: epitope presenting peptide
MYASAVVLL

SEQ ID NO: 870 - protein, 9 aa, synthetic construct
  REGION 1..9: note = Description of sequence: epitope presenting peptide
MFLARGIVF

SEQ ID NO: 871 - protein, 9 aa, synthetic construct
  REGION 1..9: note = Description of sequence: epitope presenting peptide
IFFITGNTL

SEQ ID NO: 872 - protein, 10 aa, synthetic construct
  REGION 1..10: note = Description of sequence: epitope presenting peptide
YDYLVSTQEF

SEQ ID NO: 873 - protein, 9 aa, synthetic construct
  REGION 1..9: note = Description of sequence: epitope presenting peptide
TYASALWEI

SEQ ID NO: 874 - protein, 9 aa, synthetic construct
  REGION 1..9: note = Description of sequence: epitope presenting peptide
YFIKGLNNL

SEQ ID NO: 875 - protein, 10 aa, synthetic construct
  REGION 1..10: note = Description of sequence: epitope presenting peptide
GYINVFAFPF

SEQ ID NO: 876 - protein, 9 aa, synthetic construct
  REGION 1..9: note = Description of sequence: epitope presenting peptide
LYLYALVYF

SEQ ID NO: 877 - protein, 9 aa, synthetic construct
  REGION 1..9: note = Description of sequence: epitope presenting peptide
VYFLQSINF

SEQ ID NO: 878 - protein, 9 aa, synthetic construct
  REGION 1..9: note = Description of sequence: epitope presenting peptide
YYQLYSTQL

SEQ ID NO: 879 - protein, 10 aa, synthetic construct
  REGION 1..10: note = Description of sequence: epitope presenting peptide
QYIDIGNYTV

SEQ ID NO: 880 - protein, 10 aa, synthetic construct
  REGION 1..10: note = Description of sequence: epitope presenting peptide
QGYKSVNITF

SEQ ID NO: 881 - protein, 9 aa, synthetic construct
  REGION 1..9: note = Description of sequence: epitope presenting peptide
DYQGKPLEF

SEQ ID NO: 882 - protein, 9 aa, synthetic construct
  REGION 1..9: note = Description of sequence: epitope presenting peptide
LYDKLVSSF

SEQ ID NO: 883 - protein, 9 aa, synthetic construct
  REGION 1..9: note = Description of sequence: epitope presenting peptide
LYIDINGNL

SEQ ID NO: 884 - protein, 10 aa, synthetic construct
  REGION 1..10: note = Description of sequence: epitope presenting peptide
VYYTSNPTTF

SEQ ID NO: 885 - protein, 10 aa, synthetic construct
  REGION 1..10: note = Description of sequence: epitope presenting peptide
EYYHTTDPSF

SEQ ID NO: 886 - protein, 9 aa, synthetic construct
  REGION 1..9: note = Description of sequence: epitope presenting peptide
SYLFQHANL

SEQ ID NO: 887 - protein, 10 aa, synthetic construct
  REGION 1..10: note = Description of sequence: epitope presenting peptide
NYYKKDNSYF

SEQ ID NO: 888 - protein, 9 aa, synthetic construct
  REGION 1..9: note = Description of sequence: epitope presenting peptide
DYKHYTPSF

SEQ ID NO: 889 - protein, 9 aa, synthetic construct
  REGION 1..9: note = Description of sequence: epitope presenting peptide
NYMPYFFTL

SEQ ID NO: 890 - protein, 11 aa, synthetic construct
  REGION 1..11: note = Description of sequence: epitope presenting peptide
AYILFTRFFYV

SEQ ID NO: 891 - protein, 9 aa, synthetic construct
  REGION 1..9: note = Description of sequence: epitope presenting peptide
FFASFYYVW

SEQ ID NO: 892 - protein, 9 aa, synthetic construct
  REGION 1..9: note = Description of sequence: epitope presenting peptide
VYANGGKGF

SEQ ID NO: 893 - protein, 10 aa, synthetic construct
  REGION 1..10: note = Description of sequence: epitope presenting peptide
KMFDAYVNTF

SEQ ID NO: 894 - protein, 10 aa, synthetic construct
  REGION 1..10: note = Description of sequence: epitope presenting peptide
AYVNTFSSTF

SEQ ID NO: 895 - protein, 12 aa, synthetic construct
  REGION 1..12: note = Description of sequence: epitope presenting peptide
IYNDKVAGFAKF

SEQ ID NO: 896 - protein, 10 aa, synthetic construct
  REGION 1..10: note = Description of sequence: epitope presenting peptide
SYFVVKRHTF

SEQ ID NO: 897 - protein, 9 aa, synthetic construct
  REGION 1..9: note = Description of sequence: epitope presenting peptide
NFNKDFYDF

SEQ ID NO: 898 - protein, 9 aa, synthetic construct
  REGION 1..9: note = Description of sequence: epitope presenting peptide
AYANSVFNI

SEQ ID NO: 899 - protein, 10 aa, synthetic construct
  REGION 1..10: note = Description of sequence: epitope presenting peptide
HLYLQYIRKL

SEQ ID NO: 900 - protein, 9 aa, synthetic construct
  REGION 1..9: note = Description of sequence: epitope presenting peptide
PFFSNVTWF

SEQ ID NO: 901 - protein, 10 aa, synthetic construct
  REGION 1..10: note = Description of sequence: epitope presenting peptide
VYSSANNCTF

SEQ ID NO: 902 - protein, 9 aa, synthetic construct
  REGION 1..9: note = Description of sequence: epitope presenting peptide
EYVSQPFLM

SEQ ID NO: 903 - protein, 10 aa, synthetic construct
  REGION 1..10: note = Description of sequence: epitope presenting peptide
LYNSASFSTF

SEQ ID NO: 904 - protein, 9 aa, synthetic construct
  REGION 1..9: note = Description of sequence: epitope presenting peptide
PYRVVVLSF

SEQ ID NO: 905 - protein, 9 aa, synthetic construct
  REGION 1..9: note = Description of sequence: epitope presenting peptide
VYSTGSNVF

SEQ ID NO: 906 - protein, 10 aa, synthetic construct
  REGION 1..10: note = Description of sequence: epitope presenting peptide
IYKTPPIKDF

SEQ ID NO: 907 - protein, 10 aa, synthetic construct
  REGION 1..10: note = Description of sequence: epitope presenting peptide
TYVPAQEKNF

SEQ ID NO: 908 - protein, 9 aa, synthetic construct
  REGION 1..9: note = Description of sequence: epitope presenting peptide
DYVYNPFMI

SEQ ID NO: 909 - protein, 8 aa, synthetic construct
  REGION 1..8: note = Description of sequence: epitope presenting peptide
TYNLWNTF

SEQ ID NO: 910 - protein, 8 aa, synthetic construct
  REGION 1..8: note = Description of sequence: epitope presenting peptide
TYNLWNTF

SEQ ID NO: 911 - protein, 9 aa, synthetic construct
  REGION 1..9: note = Description of sequence: epitope presenting peptide
NYLKRRVVF

SEQ ID NO: 912 - protein, 11 aa, synthetic construct
  REGION 1..11: note = Description of sequence: epitope presenting peptide
NYSGVVTTVMF

SEQ ID NO: 913 - protein, 9 aa, synthetic construct
  REGION 1..9: note = Description of sequence: epitope presenting peptide
NYSGVVTTF

SEQ ID NO: 914 - protein, 9 aa, synthetic construct
  REGION 1..9: note = Description of sequence: epitope presenting peptide
AFPFTIYSL

SEQ ID NO: 915 - protein, 9 aa, synthetic construct
  REGION 1..9: note = Description of sequence: epitope presenting peptide
PYNSVTSSI

SEQ ID NO: 916 - protein, 12 aa, synthetic construct
  REGION 1..12: note = Description of sequence: epitope presenting peptide
YYRARAGEAANF

SEQ ID NO: 917 - protein, 9 aa, synthetic construct
  REGION 1..9: note = Description of sequence: epitope presenting peptide
YYAGEAANF

SEQ ID NO: 918 - protein, 11 aa, synthetic construct
  REGION 1..11: note = Description of sequence: epitope presenting peptide
MYMGTLSYEQF

SEQ ID NO: 919 - protein, 9 aa, synthetic construct
  REGION 1..9: note = Description of sequence: epitope presenting peptide
MYMGSYEQF

SEQ ID NO: 920 - protein, 12 aa, synthetic construct
  REGION 1..12: note = Description of sequence: epitope presenting peptide
PYPNASFDNFKF

SEQ ID NO: 921 - protein, 9 aa, synthetic construct
  REGION 1..9: note = Description of sequence: epitope presenting peptide
TYKPNTWCI

SEQ ID NO: 922 - protein, 9 aa, synthetic construct
  REGION 1..9: note = Description of sequence: epitope presenting peptide
FYGGWHNML

SEQ ID NO: 923 - protein, 11 aa, synthetic construct
  REGION 1..11: note = Description of sequence: epitope presenting peptide
RFPNITNLCPF

SEQ ID NO: 924 - protein, 9 aa, synthetic construct
  REGION 1..9: note = Description of sequence: epitope presenting peptide
RFPNITNLF

SEQ ID NO: 925 - protein, 9 aa, synthetic construct
  REGION 1..9: note = Description of sequence: epitope presenting peptide
AYIAIPTNF

SEQ ID NO: 926 - protein, 9 aa, synthetic construct
  REGION 1..9: note = Description of sequence: epitope presenting peptide
QPGQTFSVL

SEQ ID NO: 927 - protein, 10 aa, synthetic construct
  REGION 1..10: note = Description of sequence: epitope presenting peptide
SPSGVYQCAM

SEQ ID NO: 928 - protein, 9 aa, synthetic construct
  REGION 1..9: note = Description of sequence: epitope presenting peptide
SPSGVYQAM

SEQ ID NO: 929 - protein, 10 aa, synthetic construct
  REGION 1..10: note = Description of sequence: epitope presenting peptide
RPNFTIKGSF

SEQ ID NO: 930 - protein, 9 aa, synthetic construct
  REGION 1..9: note = Description of sequence: epitope presenting peptide
RPNTIKGSF

SEQ ID NO: 931 - protein, 9 aa, synthetic construct
  REGION 1..9: note = Description of sequence: epitope presenting peptide
TPHTVLQAV

SEQ ID NO: 932 - protein, 12 aa, synthetic construct
  REGION 1..12: note = Description of sequence: epitope presenting peptide
KPRPPLNRNYVF

SEQ ID NO: 933 - protein, 9 aa, synthetic construct
  REGION 1..9: note = Description of sequence: epitope presenting peptide
KPRPPLNVF

SEQ ID NO: 934 - protein, 8 aa, synthetic construct
  REGION 1..8: note = Description of sequence: epitope presenting peptide
MPLSAPTL

SEQ ID NO: 935 - protein, 8 aa, synthetic construct
  REGION 1..8: note = Description of sequence: epitope presenting peptide
MPLSAPTL

SEQ ID NO: 936 - protein, 10 aa, synthetic construct
  REGION 1..10: note = Description of sequence: epitope presenting peptide
IPARARVECF

SEQ ID NO: 937 - protein, 9 aa, synthetic construct
  REGION 1..9: note = Description of sequence: epitope presenting peptide
IPARARVEF

SEQ ID NO: 938 - protein, 11 aa, synthetic construct
  REGION 1..11: note = Description of sequence: epitope presenting peptide
APRTLLTKGTL

SEQ ID NO: 939 - protein, 10 aa, synthetic construct
  REGION 1..10: note = Description of sequence: epitope presenting peptide
RPQIGVVREF

SEQ ID NO: 940 - protein, 9 aa, synthetic construct
  REGION 1..9: note = Description of sequence: epitope presenting peptide
RPQIGVVEF

SEQ ID NO: 941 - protein, 10 aa, synthetic construct
  REGION 1..10: note = Description of sequence: epitope presenting peptide
RNPAWRKAVF

SEQ ID NO: 942 - protein, 14 aa, synthetic construct
  REGION 1..14: note = Description of sequence: epitope presenting peptide
SPYNSQNAVASKIL

SEQ ID NO: 943 - protein, 9 aa, synthetic construct
  REGION 1..9: note = Description of sequence: epitope presenting peptide
SPYNSQNAL

SEQ ID NO: 944 - protein, 9 aa, synthetic construct
  REGION 1..9: note = Description of sequence: epitope presenting peptide
IPRRNVATL

SEQ ID NO: 945 - protein, 8 aa, synthetic construct
  REGION 1..8: note = Description of sequence: epitope presenting peptide
VPLHGTIL

SEQ ID NO: 946 - protein, 8 aa, synthetic construct
  REGION 1..8: note = Description of sequence: epitope presenting peptide
VPLHGTIL

SEQ ID NO: 947 - protein, 9 aa, synthetic construct
  REGION 1..9: note = Description of sequence: epitope presenting peptide
RTAPHGHVM

SEQ ID NO: 948 - protein, 10 aa, synthetic construct
  REGION 1..10: note = Description of sequence: epitope presenting peptide
APHGHVMVEL

SEQ ID NO: 949 - protein, 9 aa, synthetic construct
  REGION 1..9: note = Description of sequence: epitope presenting peptide
APHGHVMVL

SEQ ID NO: 950 - protein, 10 aa, synthetic construct
  REGION 1..10: note = Description of sequence: epitope presenting peptide
VPANSTVLSF

SEQ ID NO: 951 - protein, 9 aa, synthetic construct
  REGION 1..9: note = Description of sequence: epitope presenting peptide
VPANSTVSF

SEQ ID NO: 952 - protein, 10 aa, synthetic construct
  REGION 1..10: note = Description of sequence: epitope presenting peptide
HPNPKGFCDL

SEQ ID NO: 953 - protein, 9 aa, synthetic construct
  REGION 1..9: note = Description of sequence: epitope presenting peptide
HPNPKGFDL

SEQ ID NO: 954 - protein, 9 aa, synthetic construct
  REGION 1..9: note = Description of sequence: epitope presenting peptide
HPTQAPTHL

SEQ ID NO: 955 - protein, 9 aa, synthetic construct
  REGION 1..9: note = Description of sequence: epitope presenting peptide
TPAFDKSAF

SEQ ID NO: 956 - protein, 9 aa, synthetic construct
  REGION 1..9: note = Description of sequence: epitope presenting peptide
LPVNVAFEL

SEQ ID NO: 957 - protein, 9 aa, synthetic construct
  REGION 1..9: note = Description of sequence: epitope presenting peptide
KPVPEVKIL

SEQ ID NO: 958 - protein, 8 aa, synthetic construct
  REGION 1..8: note = Description of sequence: epitope presenting peptide
APAHISTI

SEQ ID NO: 959 - protein, 8 aa, synthetic construct
  REGION 1..8: note = Description of sequence: epitope presenting peptide
APAHISTI

SEQ ID NO: 960 - protein, 12 aa, synthetic construct
  REGION 1..12: note = Description of sequence: epitope presenting peptide
GPKQASLNGVTL

SEQ ID NO: 961 - protein, 9 aa, synthetic construct
  REGION 1..9: note = Description of sequence: epitope presenting peptide
GPKQAGVTL

SEQ ID NO: 962 - protein, 8 aa, synthetic construct
  REGION 1..8: note = Description of sequence: epitope presenting peptide
KPRSQMEI

SEQ ID NO: 963 - protein, 8 aa, synthetic construct
  REGION 1..8: note = Description of sequence: epitope presenting peptide
KPRSQMEI

SEQ ID NO: 964 - protein, 9 aa, synthetic construct
  REGION 1..9: note = Description of sequence: epitope presenting peptide
LPKGIMMNV

SEQ ID NO: 965 - protein, 10 aa, synthetic construct
  REGION 1..10: note = Description of sequence: epitope presenting peptide
VPYNMRVIHF

SEQ ID NO: 966 - protein, 11 aa, synthetic construct
  REGION 1..11: note = Description of sequence: epitope presenting peptide
KPREQIDGYVM

SEQ ID NO: 967 - protein, 9 aa, synthetic construct
  REGION 1..9: note = Description of sequence: epitope presenting peptide
QPRVEKKKL

SEQ ID NO: 968 - protein, 9 aa, synthetic construct
  REGION 1..9: note = Description of sequence: epitope presenting peptide
MPLKAPKEI

SEQ ID NO: 969 - protein, 8 aa, synthetic construct
  REGION 1..8: note = Description of sequence: epitope presenting peptide
APKEIIFL

SEQ ID NO: 970 - protein, 8 aa, synthetic construct
  REGION 1..8: note = Description of sequence: epitope presenting peptide
APKEIIFL

SEQ ID NO: 971 - protein, 10 aa, synthetic construct
  REGION 1..10: note = Description of sequence: epitope presenting peptide
VVPGLPGTIL

SEQ ID NO: 972 - protein, 9 aa, synthetic construct
  REGION 1..9: note = Description of sequence: epitope presenting peptide
VPGLPGTIL

SEQ ID NO: 973 - protein, 10 aa, synthetic construct
  REGION 1..10: note = Description of sequence: epitope presenting peptide
VPYCYDTNVL

SEQ ID NO: 974 - protein, 9 aa, synthetic construct
  REGION 1..9: note = Description of sequence: epitope presenting peptide
VPYYDTNVL

SEQ ID NO: 975 - protein, 9 aa, synthetic construct
  REGION 1..9: note = Description of sequence: epitope presenting peptide
RPDTRYVLM

SEQ ID NO: 976 - protein, 10 aa, synthetic construct
  REGION 1..10: note = Description of sequence: epitope presenting peptide
TPLIQPIGAL

SEQ ID NO: 977 - protein, 9 aa, synthetic construct
  REGION 1..9: note = Description of sequence: epitope presenting peptide
TPIQPIGAL

SEQ ID NO: 978 - protein, 10 aa, synthetic construct
  REGION 1..10: note = Description of sequence: epitope presenting peptide
LPFAMGIIAM

SEQ ID NO: 979 - protein, 9 aa, synthetic construct
  REGION 1..9: note = Description of sequence: epitope presenting peptide
IPLTTAAKL

SEQ ID NO: 980 - protein, 9 aa, synthetic construct
  REGION 1..9: note = Description of sequence: epitope presenting peptide
SPNLAWPLI

SEQ ID NO: 981 - protein, 8 aa, synthetic construct
  REGION 1..8: note = Description of sequence: epitope presenting peptide
SPVALRQM

SEQ ID NO: 982 - protein, 8 aa, synthetic construct
  REGION 1..8: note = Description of sequence: epitope presenting peptide
SPVALRQM

SEQ ID NO: 983 - protein, 10 aa, synthetic construct
  REGION 1..10: note = Description of sequence: epitope presenting peptide
TPKGPKVKYL

SEQ ID NO: 984 - protein, 10 aa, synthetic construct
  REGION 1..10: note = Description of sequence: epitope presenting peptide
KFPRGQGVPI

SEQ ID NO: 985 - protein, 9 aa, synthetic construct
  REGION 1..9: note = Description of sequence: epitope presenting peptide
KPRGQGVPI

SEQ ID NO: 986 - protein, 9 aa, synthetic construct
  REGION 1..9: note = Description of sequence: epitope presenting peptide
SPRWYFYYL

SEQ ID NO: 987 - protein, 9 aa, synthetic construct
  REGION 1..9: note = Description of sequence: epitope presenting peptide
IPIQASLPF

SEQ ID NO: 988 - protein, 9 aa, synthetic construct
  REGION 1..9: note = Description of sequence: epitope presenting peptide
APFLYLYAL

SEQ ID NO: 989 - protein, 13 aa, synthetic construct
  REGION 1..13: note = Description of sequence: epitope presenting peptide
SPFHPLADNKFAL

SEQ ID NO: 990 - protein, 9 aa, synthetic construct
  REGION 1..9: note = Description of sequence: epitope presenting peptide
SPFHPLAAL

SEQ ID NO: 991 - protein, 9 aa, synthetic construct
  REGION 1..9: note = Description of sequence: epitope presenting peptide
RARSVSPKL

SEQ ID NO: 992 - protein, 12 aa, synthetic construct
  REGION 1..12: note = Description of sequence: epitope presenting peptide
KPLEFGATSAAL

SEQ ID NO: 993 - protein, 9 aa, synthetic construct
  REGION 1..9: note = Description of sequence: epitope presenting peptide
APLLSAGIF

SEQ ID NO: 994 - protein, 9 aa, synthetic construct
  REGION 1..9: note = Description of sequence: epitope presenting peptide
APYIVGDVV

SEQ ID NO: 995 - protein, 10 aa, synthetic construct
  REGION 1..10: note = Description of sequence: epitope presenting peptide
YPQVNGLTSI

SEQ ID NO: 996 - protein, 9 aa, synthetic construct
  REGION 1..9: note = Description of sequence: epitope presenting peptide
YPQNGLTSI

SEQ ID NO: 997 - protein, 11 aa, synthetic construct
  REGION 1..11: note = Description of sequence: epitope presenting peptide
KPASRELKVTF

SEQ ID NO: 998 - protein, 9 aa, synthetic construct
  REGION 1..9: note = Description of sequence: epitope presenting peptide
KPRELKVTF

SEQ ID NO: 999 - protein, 10 aa, synthetic construct
  REGION 1..10: note = Description of sequence: epitope presenting peptide
TPSFKKGAKL

SEQ ID NO: 1000 - protein, 9 aa, synthetic construct
  REGION 1..9: note = Description of sequence: epitope presenting peptide
TPFKKGAKL

SEQ ID NO: 1001 - protein, 9 aa, synthetic construct
  REGION 1..9: note = Description of sequence: epitope presenting peptide
KPANNSLKI

SEQ ID NO: 1002 - protein, 10 aa, synthetic construct
  REGION 1..10: note = Description of sequence: epitope presenting peptide
KKPNELSRVL

SEQ ID NO: 1003 - protein, 9 aa, synthetic construct
  REGION 1..9: note = Description of sequence: epitope presenting peptide
KPNELSRVL

SEQ ID NO: 1004 - protein, 9 aa, synthetic construct
  REGION 1..9: note = Description of sequence: epitope presenting peptide
MPYFFTLLL

SEQ ID NO: 1005 - protein, 9 aa, synthetic construct
  REGION 1..9: note = Description of sequence: epitope presenting peptide
TPRDLGACI

SEQ ID NO: 1006 - protein, 9 aa, synthetic construct
  REGION 1..9: note = Description of sequence: epitope presenting peptide
VAKSHNIAL

SEQ ID NO: 1007 - protein, 10 aa, synthetic construct
  REGION 1..10: note = Description of sequence: epitope presenting peptide
MVPHISRQRL

SEQ ID NO: 1008 - protein, 10 aa, synthetic construct
  REGION 1..10: note = Description of sequence: epitope presenting peptide
MPILTLTRAL

SEQ ID NO: 1009 - protein, 9 aa, synthetic construct
  REGION 1..9: note = Description of sequence: epitope presenting peptide
MPILTTRAL

SEQ ID NO: 1010 - protein, 9 aa, synthetic construct
  REGION 1..9: note = Description of sequence: epitope presenting peptide
KPYIKWDLL

SEQ ID NO: 1011 - protein, 9 aa, synthetic construct
  REGION 1..9: note = Description of sequence: epitope presenting peptide
IPTITQMNL

SEQ ID NO: 1012 - protein, 9 aa, synthetic construct
  REGION 1..9: note = Description of sequence: epitope presenting peptide
LPFNDGVYF

SEQ ID NO: 1013 - protein, 8 aa, synthetic construct
  REGION 1..8: note = Description of sequence: epitope presenting peptide
LPQGFSAL

SEQ ID NO: 1014 - protein, 11 aa, synthetic construct
  REGION 1..11: note = Description of sequence: epitope presenting peptide
KPFERDISTEI

SEQ ID NO: 1015 - protein, 9 aa, synthetic construct
  REGION 1..9: note = Description of sequence: epitope presenting peptide
GPKKSTNLV

SEQ ID NO: 1016 - protein, 8 aa, synthetic construct
  REGION 1..8: note = Description of sequence: epitope presenting peptide
APHGVVFL

SEQ ID NO: 1017 - protein, 8 aa, synthetic construct
  REGION 1..8: note = Description of sequence: epitope presenting peptide
APHGVVFL

SEQ ID NO: 1018 - protein, 9 aa, synthetic construct
  REGION 1..9: note = Description of sequence: epitope presenting peptide
QLRVIGHSM

SEQ ID NO: 1019 - protein, 9 aa, synthetic construct
  REGION 1..9: note = Description of sequence: epitope presenting peptide
TPKYKFVRI

SEQ ID NO: 1020 - protein, 9 aa, synthetic construct
  REGION 1..9: note = Description of sequence: epitope presenting peptide
YVYSRVKNL

SEQ ID NO: 1021 - protein, 8 aa, synthetic construct
  REGION 1..8: note = Description of sequence: epitope presenting peptide
VGKPRPPL

SEQ ID NO: 1022 - protein, 8 aa, synthetic construct
  REGION 1..8: note = Description of sequence: epitope presenting peptide
VGKPRPPL

SEQ ID NO: 1023 - protein, 9 aa, synthetic construct
  REGION 1..9: note = Description of sequence: epitope presenting peptide
VGMQKYSTL

SEQ ID NO: 1024 - protein, 9 aa, synthetic construct
  REGION 1..9: note = Description of sequence: epitope presenting peptide
YDKLQFTSL

SEQ ID NO: 1025 - protein, 9 aa, synthetic construct
  REGION 1..9: note = Description of sequence: epitope presenting peptide
RLFARTRSM

SEQ ID NO: 1026 - protein, 9 aa, synthetic construct
  REGION 1..9: note = Description of sequence: epitope presenting peptide
DLKGKYVQI

SEQ ID NO: 1027 - protein, 9 aa, synthetic construct
  REGION 1..9: note = Description of sequence: epitope presenting peptide
MTYRRLISM

SEQ ID NO: 1028 - protein, 9 aa, synthetic construct
  REGION 1..9: note = Description of sequence: epitope presenting peptide
VVRIKIVQM

SEQ ID NO: 1029 - protein, 8 aa, synthetic construct
  REGION 1..8: note = Description of sequence: epitope presenting peptide
HMVVKAAL

SEQ ID NO: 1030 - protein, 9 aa, synthetic construct
  REGION 1..9: note = Description of sequence: epitope presenting peptide
SLYVNKHAF

SEQ ID NO: 1031 - protein, 9 aa, synthetic construct
  REGION 1..9: note = Description of sequence: epitope presenting peptide
HANEYRLYL

SEQ ID NO: 1032 - protein, 9 aa, synthetic construct
  REGION 1..9: note = Description of sequence: epitope presenting peptide
NTFTRLQSL

SEQ ID NO: 1033 - protein, 9 aa, synthetic construct
  REGION 1..9: note = Description of sequence: epitope presenting peptide
SVGPKQASL

SEQ ID NO: 1034 - protein, 8 aa, synthetic construct
  REGION 1..8: note = Description of sequence: epitope presenting peptide
NVAKYTQL

SEQ ID NO: 1035 - protein, 8 aa, synthetic construct
  REGION 1..8: note = Description of sequence: epitope presenting peptide
NVAKYTQL

SEQ ID NO: 1036 - protein, 8 aa, synthetic construct
  REGION 1..8: note = Description of sequence: epitope presenting peptide
FIQQKLAL

SEQ ID NO: 1037 - protein, 8 aa, synthetic construct
  REGION 1..8: note = Description of sequence: epitope presenting peptide
FIQQKLAL

SEQ ID NO: 1038 - protein, 9 aa, synthetic construct
  REGION 1..9: note = Description of sequence: epitope presenting peptide
GAKLKALNL

SEQ ID NO: 1039 - protein, 9 aa, synthetic construct
  REGION 1..9: note = Description of sequence: epitope presenting peptide
HVMSKHTDF

SEQ ID NO: 1040 - protein, 8 aa, synthetic construct
  REGION 1..8: note = Description of sequence: epitope presenting peptide
FMRFRRAF

SEQ ID NO: 1041 - protein, 8 aa, synthetic construct
  REGION 1..8: note = Description of sequence: epitope presenting peptide
FMRFRRAF

SEQ ID NO: 1042 - protein, 9 aa, synthetic construct
  REGION 1..9: note = Description of sequence: epitope presenting peptide
YLKLRSDVL

SEQ ID NO: 1043 - protein, 9 aa, synthetic construct
  REGION 1..9: note = Description of sequence: epitope presenting peptide
TQYNRYLAL

SEQ ID NO: 1044 - protein, 9 aa, synthetic construct
  REGION 1..9: note = Description of sequence: epitope presenting peptide
FVKHKHAFL

SEQ ID NO: 1045 - protein, 9 aa, synthetic construct
  REGION 1..9: note = Description of sequence: epitope presenting peptide
DGARRVWTL

SEQ ID NO: 1046 - protein, 9 aa, synthetic construct
  REGION 1..9: note = Description of sequence: epitope presenting peptide
EMLDNRATL

SEQ ID NO: 1047 - protein, 9 aa, synthetic construct
  REGION 1..9: note = Description of sequence: epitope presenting peptide
VLKKLKKSL

SEQ ID NO: 1048 - protein, 9 aa, synthetic construct
  REGION 1..9: note = Description of sequence: epitope presenting peptide
GPKVKYLYF

SEQ ID NO: 1049 - protein, 9 aa, synthetic construct
  REGION 1..9: note = Description of sequence: epitope presenting peptide
NNLNRGMVL

SEQ ID NO: 1050 - protein, 9 aa, synthetic construct
  REGION 1..9: note = Description of sequence: epitope presenting peptide
ITLKKRWQL

SEQ ID NO: 1051 - protein, 9 aa, synthetic construct
  REGION 1..9: note = Description of sequence: epitope presenting peptide
IIKNLSKSL

SEQ ID NO: 1052 - protein, 9 aa, synthetic construct
  REGION 1..9: note = Description of sequence: epitope presenting peptide
DGVKHVYQL

SEQ ID NO: 1053 - protein, 8 aa, synthetic construct
  REGION 1..8: note = Description of sequence: epitope presenting peptide
NLKTLLSL

SEQ ID NO: 1054 - protein, 8 aa, synthetic construct
  REGION 1..8: note = Description of sequence: epitope presenting peptide
NLKTLLSL

SEQ ID NO: 1055 - protein, 9 aa, synthetic construct
  REGION 1..9: note = Description of sequence: epitope presenting peptide
TIKPVTYKL

SEQ ID NO: 1056 - protein, 9 aa, synthetic construct
  REGION 1..9: note = Description of sequence: epitope presenting peptide
ILKPANNSL

SEQ ID NO: 1057 - protein, 8 aa, synthetic construct
  REGION 1..8: note = Description of sequence: epitope presenting peptide
TIKKPNEL

SEQ ID NO: 1058 - protein, 8 aa, synthetic construct
  REGION 1..8: note = Description of sequence: epitope presenting peptide
TIKKPNEL

SEQ ID NO: 1059 - protein, 8 aa, synthetic construct
  REGION 1..8: note = Description of sequence: epitope presenting peptide
NSRIKASM

SEQ ID NO: 1060 - protein, 8 aa, synthetic construct
  REGION 1..8: note = Description of sequence: epitope presenting peptide
NSRIKASM

SEQ ID NO: 1061 - protein, 8 aa, synthetic construct
  REGION 1..8: note = Description of sequence: epitope presenting peptide
KTYERHSL

SEQ ID NO: 1062 - protein, 8 aa, synthetic construct
  REGION 1..8: note = Description of sequence: epitope presenting peptide
KTYERHSL

SEQ ID NO: 1063 - protein, 10 aa, synthetic construct
  REGION 1..10: note = Description of sequence: epitope presenting peptide
NVPMEKLKTL

SEQ ID NO: 1064 - protein, 8 aa, synthetic construct
  REGION 1..8: note = Description of sequence: epitope presenting peptide
NVKDFMSL

SEQ ID NO: 1065 - protein, 8 aa, synthetic construct
  REGION 1..8: note = Description of sequence: epitope presenting peptide
NVKDFMSL

SEQ ID NO: 1066 - protein, 8 aa, synthetic construct
  REGION 1..8: note = Description of sequence: epitope presenting peptide
SAAKKNNL

SEQ ID NO: 1067 - protein, 8 aa, synthetic construct
  REGION 1..8: note = Description of sequence: epitope presenting peptide
SAAKKNNL

SEQ ID NO: 1068 - protein, 9 aa, synthetic construct
  REGION 1..9: note = Description of sequence: epitope presenting peptide
FAYTKRNVI

SEQ ID NO: 1069 - protein, 9 aa, synthetic construct
  REGION 1..9: note = Description of sequence: epitope presenting peptide
SAKNRARTV

SEQ ID NO: 1070 - protein, 9 aa, synthetic construct
  REGION 1..9: note = Description of sequence: epitope presenting peptide
IAATRGATV

SEQ ID NO: 1071 - protein, 9 aa, synthetic construct
  REGION 1..9: note = Description of sequence: epitope presenting peptide
SLSHRFYRL

SEQ ID NO: 1072 - protein, 8 aa, synthetic construct
  REGION 1..8: note = Description of sequence: epitope presenting peptide
YAYLRKHF

SEQ ID NO: 1073 - protein, 8 aa, synthetic construct
  REGION 1..8: note = Description of sequence: epitope presenting peptide
YAYLRKHF

SEQ ID NO: 1074 - protein, 9 aa, synthetic construct
  REGION 1..9: note = Description of sequence: epitope presenting peptide
YLRKHFSMM

SEQ ID NO: 1075 - protein, 9 aa, synthetic construct
  REGION 1..9: note = Description of sequence: epitope presenting peptide
SIKNFKSVL

SEQ ID NO: 1076 - protein, 8 aa, synthetic construct
  REGION 1..8: note = Description of sequence: epitope presenting peptide
NLTTRTQL

SEQ ID NO: 1077 - protein, 9 aa, synthetic construct
  REGION 1..9: note = Description of sequence: epitope presenting peptide
INITRFQTL

SEQ ID NO: 1078 - protein, 8 aa, synthetic construct
  REGION 1..8: note = Description of sequence: epitope presenting peptide
YLQPRTFL

SEQ ID NO: 1079 - protein, 8 aa, synthetic construct
  REGION 1..8: note = Description of sequence: epitope presenting peptide
YLQPRTFL

SEQ ID NO: 1080 - protein, 9 aa, synthetic construct
  REGION 1..9: note = Description of sequence: epitope presenting peptide
TANPKTPKY

SEQ ID NO: 1081 - protein, 10 aa, synthetic construct
  REGION 1..10: note = Description of sequence: epitope presenting peptide
FPLCANGQVF

SEQ ID NO: 1082 - protein, 9 aa, synthetic construct
  REGION 1..9: note = Description of sequence: epitope presenting peptide
FPLANGQVF

SEQ ID NO: 1083 - protein, 10 aa, synthetic construct
  REGION 1..10: note = Description of sequence: epitope presenting peptide
YPTLNISDEF

SEQ ID NO: 1084 - protein, 9 aa, synthetic construct
  REGION 1..9: note = Description of sequence: epitope presenting peptide
YPLNISDEF

SEQ ID NO: 1085 - protein, 9 aa, synthetic construct
  REGION 1..9: note = Description of sequence: epitope presenting peptide
FAIGLALYY

SEQ ID NO: 1086 - protein, 8 aa, synthetic construct
  REGION 1..8: note = Description of sequence: epitope presenting peptide
YPSARIVY

SEQ ID NO: 1087 - protein, 8 aa, synthetic construct
  REGION 1..8: note = Description of sequence: epitope presenting peptide
YPSARIVY

SEQ ID NO: 1088 - protein, 9 aa, synthetic construct
  REGION 1..9: note = Description of sequence: epitope presenting peptide
FAYANRNRF

SEQ ID NO: 1089 - protein, 9 aa, synthetic construct
  REGION 1..9: note = Description of sequence: epitope presenting peptide
YANRNRFLY

SEQ ID NO: 1090 - protein, 11 aa, synthetic construct
  REGION 1..11: note = Description of sequence: epitope presenting peptide
VPHVGEIPVAY

SEQ ID NO: 1091 - protein, 9 aa, synthetic construct
  REGION 1..9: note = Description of sequence: epitope presenting peptide
HVGEIPVAY

SEQ ID NO: 1092 - protein, 10 aa, synthetic construct
  REGION 1..10: note = Description of sequence: epitope presenting peptide
FAVDAAKAYK

SEQ ID NO: 1093 - protein, 9 aa, synthetic construct
  REGION 1..9: note = Description of sequence: epitope presenting peptide
EANMDQESF

SEQ ID NO: 1094 - protein, 10 aa, synthetic construct
  REGION 1..10: note = Description of sequence: epitope presenting peptide
IPGIPKDMTY

SEQ ID NO: 1095 - protein, 9 aa, synthetic construct
  REGION 1..9: note = Description of sequence: epitope presenting peptide
IPIPKDMTY

SEQ ID NO: 1096 - protein, 9 aa, synthetic construct
  REGION 1..9: note = Description of sequence: epitope presenting peptide
HSIGFDYVY

SEQ ID NO: 1097 - protein, 10 aa, synthetic construct
  REGION 1..10: note = Description of sequence: epitope presenting peptide
YPANSIVCRF

SEQ ID NO: 1098 - protein, 9 aa, synthetic construct
  REGION 1..9: note = Description of sequence: epitope presenting peptide
YPANSIVRF

SEQ ID NO: 1099 - protein, 9 aa, synthetic construct
  REGION 1..9: note = Description of sequence: epitope presenting peptide
EAVKTQFNY

SEQ ID NO: 1100 - protein, 8 aa, synthetic construct
  REGION 1..8: note = Description of sequence: epitope presenting peptide
YAFEHIVY

SEQ ID NO: 1101 - protein, 8 aa, synthetic construct
  REGION 1..8: note = Description of sequence: epitope presenting peptide
YAFEHIVY

SEQ ID NO: 1102 - protein, 10 aa, synthetic construct
  REGION 1..10: note = Description of sequence: epitope presenting peptide
IPMDSTVKNY

SEQ ID NO: 1103 - protein, 9 aa, synthetic construct
  REGION 1..9: note = Description of sequence: epitope presenting peptide
IPMDSTVKY

SEQ ID NO: 1104 - protein, 9 aa, synthetic construct
  REGION 1..9: note = Description of sequence: epitope presenting peptide
QAWQPGVAM

SEQ ID NO: 1105 - protein, 9 aa, synthetic construct
  REGION 1..9: note = Description of sequence: epitope presenting peptide
TILDGISQY

SEQ ID NO: 1106 - protein, 9 aa, synthetic construct
  REGION 1..9: note = Description of sequence: epitope presenting peptide
DASGKPVPY

SEQ ID NO: 1107 - protein, 9 aa, synthetic construct
  REGION 1..9: note = Description of sequence: epitope presenting peptide
NVLEGSVAY

SEQ ID NO: 1108 - protein, 9 aa, synthetic construct
  REGION 1..9: note = Description of sequence: epitope presenting peptide
SIIQFPNTY

SEQ ID NO: 1109 - protein, 10 aa, synthetic construct
  REGION 1..10: note = Description of sequence: epitope presenting peptide
FLPGVYSVIY

SEQ ID NO: 1110 - protein, 9 aa, synthetic construct
  REGION 1..9: note = Description of sequence: epitope presenting peptide
VPFWITIAY

SEQ ID NO: 1111 - protein, 9 aa, synthetic construct
  REGION 1..9: note = Description of sequence: epitope presenting peptide
LPLTQYNRY

SEQ ID NO: 1112 - protein, 11 aa, synthetic construct
  REGION 1..11: note = Description of sequence: epitope presenting peptide
FLLPSLATVAY

SEQ ID NO: 1113 - protein, 9 aa, synthetic construct
  REGION 1..9: note = Description of sequence: epitope presenting peptide
NALDQAISM

SEQ ID NO: 1114 - protein, 9 aa, synthetic construct
  REGION 1..9: note = Description of sequence: epitope presenting peptide
LAKDTTEAF

SEQ ID NO: 1115 - protein, 9 aa, synthetic construct
  REGION 1..9: note = Description of sequence: epitope presenting peptide
LPNNTASWF

SEQ ID NO: 1116 - protein, 9 aa, synthetic construct
  REGION 1..9: note = Description of sequence: epitope presenting peptide
KAYNVTQAF

SEQ ID NO: 1117 - protein, 9 aa, synthetic construct
  REGION 1..9: note = Description of sequence: epitope presenting peptide
TPSGTWLTY

SEQ ID NO: 1118 - protein, 9 aa, synthetic construct
  REGION 1..9: note = Description of sequence: epitope presenting peptide
LPAADLDDF

SEQ ID NO: 1119 - protein, 9 aa, synthetic construct
  REGION 1..9: note = Description of sequence: epitope presenting peptide
NPLLYDANY

SEQ ID NO: 1120 - protein, 13 aa, synthetic construct
  REGION 1..13: note = Description of sequence: epitope presenting peptide
FAFACPDGVKHVY

SEQ ID NO: 1121 - protein, 9 aa, synthetic construct
  REGION 1..9: note = Description of sequence: epitope presenting peptide
FPDGVKHVY

SEQ ID NO: 1122 - protein, 9 aa, synthetic construct
  REGION 1..9: note = Description of sequence: epitope presenting peptide
YPGQGLNGY

SEQ ID NO: 1123 - protein, 11 aa, synthetic construct
  REGION 1..11: note = Description of sequence: epitope presenting peptide
SPDAVTAYNGY

SEQ ID NO: 1124 - protein, 8 aa, synthetic construct
  REGION 1..8: note = Description of sequence: epitope presenting peptide
SPDAVTAY

SEQ ID NO: 1125 - protein, 9 aa, synthetic construct
  REGION 1..9: note = Description of sequence: epitope presenting peptide
QVVDMSMTY

SEQ ID NO: 1126 - protein, 14 aa, synthetic construct
  REGION 1..14: note = Description of sequence: epitope presenting peptide
LPNDDTLRVEAFEY

SEQ ID NO: 1127 - protein, 9 aa, synthetic construct
  REGION 1..9: note = Description of sequence: epitope presenting peptide
LPNDDTLEY

SEQ ID NO: 1128 - protein, 9 aa, synthetic construct
  REGION 1..9: note = Description of sequence: epitope presenting peptide
NPPALQDAY

SEQ ID NO: 1129 - protein, 10 aa, synthetic construct
  REGION 1..10: note = Description of sequence: epitope presenting peptide
TKPVETSNSF

SEQ ID NO: 1130 - protein, 9 aa, synthetic construct
  REGION 1..9: note = Description of sequence: epitope presenting peptide
VPWDTIANY

SEQ ID NO: 1131 - protein, 9 aa, synthetic construct
  REGION 1..9: note = Description of sequence: epitope presenting peptide
YPSLETIQI

SEQ ID NO: 1132 - protein, 9 aa, synthetic construct
  REGION 1..9: note = Description of sequence: epitope presenting peptide
VARDLSLQF

SEQ ID NO: 1133 - protein, 9 aa, synthetic construct
  REGION 1..9: note = Description of sequence: epitope presenting peptide
SAKSASVYY

SEQ ID NO: 1134 - protein, 9 aa, synthetic construct
  REGION 1..9: note = Description of sequence: epitope presenting peptide
VPFVVSTGY

SEQ ID NO: 1135 - protein, 9 aa, synthetic construct
  REGION 1..9: note = Description of sequence: epitope presenting peptide
NAAISDYDY

SEQ ID NO: 1136 - protein, 9 aa, synthetic construct
  REGION 1..9: note = Description of sequence: epitope presenting peptide
FVVEVVDKY

SEQ ID NO: 1137 - protein, 9 aa, synthetic construct
  REGION 1..9: note = Description of sequence: epitope presenting peptide
NPHLMGWDY

SEQ ID NO: 1138 - protein, 9 aa, synthetic construct
  REGION 1..9: note = Description of sequence: epitope presenting peptide
FVSLAIDAY

SEQ ID NO: 1139 - protein, 11 aa, synthetic construct
  REGION 1..11: note = Description of sequence: epitope presenting peptide
YPLTKHPNQEY

SEQ ID NO: 1140 - protein, 9 aa, synthetic construct
  REGION 1..9: note = Description of sequence: epitope presenting peptide
YPLTPNQEY

SEQ ID NO: 1141 - protein, 13 aa, synthetic construct
  REGION 1..13: note = Description of sequence: epitope presenting peptide
HPNQEYADVFHLY

SEQ ID NO: 1142 - protein, 9 aa, synthetic construct
  REGION 1..9: note = Description of sequence: epitope presenting peptide
LPFFSNVTW

SEQ ID NO: 1143 - protein, 10 aa, synthetic construct
  REGION 1..10: note = Description of sequence: epitope presenting peptide
LPIGINITRF

SEQ ID NO: 1144 - protein, 9 aa, synthetic construct
  REGION 1..9: note = Description of sequence: epitope presenting peptide
LPIGINITF

SEQ ID NO: 1145 - protein, 9 aa, synthetic construct
  REGION 1..9: note = Description of sequence: epitope presenting peptide
QPTESIVRF

SEQ ID NO: 1146 - protein, 9 aa, synthetic construct
  REGION 1..9: note = Description of sequence: epitope presenting peptide
NATRFASVY

SEQ ID NO: 1147 - protein, 11 aa, synthetic construct
  REGION 1..11: note = Description of sequence: epitope presenting peptide
IPIGAGICASY

SEQ ID NO: 1148 - protein, 9 aa, synthetic construct
  REGION 1..9: note = Description of sequence: epitope presenting peptide
IPIGAGISY

SEQ ID NO: 1149 - protein, 9 aa, synthetic construct
  REGION 1..9: note = Description of sequence: epitope presenting peptide
LGAENSVAY

SEQ ID NO: 1150 - protein, 9 aa, synthetic construct
  REGION 1..9: note = Description of sequence: epitope presenting peptide
IPFAMQMAY

SEQ ID NO: 1151 - protein, 9 aa, synthetic construct
  REGION 1..9: note = Description of sequence: epitope presenting peptide
FPAPHGVVF

SEQ ID NO: 1152 - protein, 11 aa, synthetic construct
  REGION 1..11: note = Description of sequence: epitope presenting peptide
SDRELHLSWEV

SEQ ID NO: 1153 - protein, 10 aa, synthetic construct
  REGION 1..10: note = Description of sequence: epitope presenting peptide
SELVIGAVIL

SEQ ID NO: 1154 - protein, 9 aa, synthetic construct
  REGION 1..9: note = Description of sequence: epitope presenting peptide
SEVIGAVIL

SEQ ID NO: 1155 - protein, 11 aa, synthetic construct
  REGION 1..11: note = Description of sequence: epitope presenting peptide
KEITVATSRTL

SEQ ID NO: 1156 - protein, 9 aa, synthetic construct
  REGION 1..9: note = Description of sequence: epitope presenting peptide
KEITVATTL

SEQ ID NO: 1157 - protein, 9 aa, synthetic construct
  REGION 1..9: note = Description of sequence: epitope presenting peptide
VEKGVLPQL

SEQ ID NO: 1158 - protein, 12 aa, synthetic construct
  REGION 1..12: note = Description of sequence: epitope presenting peptide
GEIPVAYRKVLL

SEQ ID NO: 1159 - protein, 10 aa, synthetic construct
  REGION 1..10: note = Description of sequence: epitope presenting peptide
TEVPANSTVL

SEQ ID NO: 1160 - protein, 9 aa, synthetic construct
  REGION 1..9: note = Description of sequence: epitope presenting peptide
TEVPANTVL

SEQ ID NO: 1161 - protein, 10 aa, synthetic construct
  REGION 1..10: note = Description of sequence: epitope presenting peptide
REAVGTNLPL

SEQ ID NO: 1162 - protein, 9 aa, synthetic construct
  REGION 1..9: note = Description of sequence: epitope presenting peptide
REAVGTNLL

SEQ ID NO: 1163 - protein, 10 aa, synthetic construct
  REGION 1..10: note = Description of sequence: epitope presenting peptide
IEYPIIGDEL

SEQ ID NO: 1164 - protein, 9 aa, synthetic construct
  REGION 1..9: note = Description of sequence: epitope presenting peptide
IEYPIGDEL

SEQ ID NO: 1165 - protein, 10 aa, synthetic construct
  REGION 1..10: note = Description of sequence: epitope presenting peptide
VELFENKTTL

SEQ ID NO: 1166 - protein, 9 aa, synthetic construct
  REGION 1..9: note = Description of sequence: epitope presenting peptide
QEFKPRSQM

SEQ ID NO: 1167 - protein, 10 aa, synthetic construct
  REGION 1..10: note = Description of sequence: epitope presenting peptide
MEIDFLELAM

SEQ ID NO: 1168 - protein, 9 aa, synthetic construct
  REGION 1..9: note = Description of sequence: epitope presenting peptide
MEIDFELAM

SEQ ID NO: 1169 - protein, 9 aa, synthetic construct
  REGION 1..9: note = Description of sequence: epitope presenting peptide
FELEDFIPM

SEQ ID NO: 1170 - protein, 9 aa, synthetic construct
  REGION 1..9: note = Description of sequence: epitope presenting peptide
VEIIKSQDL

SEQ ID NO: 1171 - protein, 11 aa, synthetic construct
  REGION 1..11: note = Description of sequence: epitope presenting peptide
YELQTPFEIKL

SEQ ID NO: 1172 - protein, 9 aa, synthetic construct
  REGION 1..9: note = Description of sequence: epitope presenting peptide
YELQTPIKL

SEQ ID NO: 1173 - protein, 13 aa, synthetic construct
  REGION 1..13: note = Description of sequence: epitope presenting peptide
ACHNSEVGPEHSL

SEQ ID NO: 1174 - protein, 9 aa, synthetic construct
  REGION 1..9: note = Description of sequence: epitope presenting peptide
AEYHNESGL

SEQ ID NO: 1175 - protein, 9 aa, synthetic construct
  REGION 1..9: note = Description of sequence: epitope presenting peptide
NESGLKTIL

SEQ ID NO: 1176 - protein, 9 aa, synthetic construct
  REGION 1..9: note = Description of sequence: epitope presenting peptide
SEGLNDNLL

SEQ ID NO: 1177 - protein, 10 aa, synthetic construct
  REGION 1..10: note = Description of sequence: epitope presenting peptide
GEQKSILSPL

SEQ ID NO: 1178 - protein, 9 aa, synthetic construct
  REGION 1..9: note = Description of sequence: epitope presenting peptide
GEQKSILSL

SEQ ID NO: 1179 - protein, 10 aa, synthetic construct
  REGION 1..10: note = Description of sequence: epitope presenting peptide
KEIKESVQTF

SEQ ID NO: 1180 - protein, 11 aa, synthetic construct
  REGION 1..11: note = Description of sequence: epitope presenting peptide
KEIIFLEGETL

SEQ ID NO: 1181 - protein, 9 aa, synthetic construct
  REGION 1..9: note = Description of sequence: epitope presenting peptide
KEFLEGETL

SEQ ID NO: 1182 - protein, 9 aa, synthetic construct
  REGION 1..9: note = Description of sequence: epitope presenting peptide
GETLPTEVL

SEQ ID NO: 1183 - protein, 11 aa, synthetic construct
  REGION 1..11: note = Description of sequence: epitope presenting peptide
FSSEIIGYKAI

SEQ ID NO: 1184 - protein, 10 aa, synthetic construct
  REGION 1..10: note = Description of sequence: epitope presenting peptide
REVGFVVPGL

SEQ ID NO: 1185 - protein, 9 aa, synthetic construct
  REGION 1..9: note = Description of sequence: epitope presenting peptide
REVGFVVGL

SEQ ID NO: 1186 - protein, 13 aa, synthetic construct
  REGION 1..13: note = Description of sequence: epitope presenting peptide
GEYSHVVAFNTLL

SEQ ID NO: 1187 - protein, 12 aa, synthetic construct
  REGION 1..12: note = Description of sequence: epitope presenting peptide
FLYENAFLPFAM

SEQ ID NO: 1188 - protein, 10 aa, synthetic construct
  REGION 1..10: note = Description of sequence: epitope presenting peptide
TEAFEKMVSL

SEQ ID NO: 1189 - protein, 10 aa, synthetic construct
  REGION 1..10: note = Description of sequence: epitope presenting peptide
KSEFDRDAAM

SEQ ID NO: 1190 - protein, 11 aa, synthetic construct
  REGION 1..11: note = Description of sequence: epitope presenting peptide
SEISMDNSPNL

SEQ ID NO: 1191 - protein, 10 aa, synthetic construct
  REGION 1..10: note = Description of sequence: epitope presenting peptide
QECVRGTTVL

SEQ ID NO: 1192 - protein, 9 aa, synthetic construct
  REGION 1..9: note = Description of sequence: epitope presenting peptide
QEVRGTTVL

SEQ ID NO: 1193 - protein, 10 aa, synthetic construct
  REGION 1..10: note = Description of sequence: epitope presenting peptide
YEGNSPFHPL

SEQ ID NO: 1194 - protein, 9 aa, synthetic construct
  REGION 1..9: note = Description of sequence: epitope presenting peptide
YENSPFHPL

SEQ ID NO: 1195 - protein, 9 aa, synthetic construct
  REGION 1..9: note = Description of sequence: epitope presenting peptide
QELYSPIFL

SEQ ID NO: 1196 - protein, 14 aa, synthetic construct
  REGION 1..14: note = Description of sequence: epitope presenting peptide
YEDFLEYHDVRVVL

SEQ ID NO: 1197 - protein, 9 aa, synthetic construct
  REGION 1..9: note = Description of sequence: epitope presenting peptide
IEVQGYKSV

SEQ ID NO: 1198 - protein, 11 aa, synthetic construct
  REGION 1..11: note = Description of sequence: epitope presenting peptide
FELDERIDKVL

SEQ ID NO: 1199 - protein, 9 aa, synthetic construct
  REGION 1..9: note = Description of sequence: epitope presenting peptide
SELLTPLGI

SEQ ID NO: 1200 - protein, 9 aa, synthetic construct
  REGION 1..9: note = Description of sequence: epitope presenting peptide
SEDNQTTTI

SEQ ID NO: 1201 - protein, 9 aa, synthetic construct
  REGION 1..9: note = Description of sequence: epitope presenting peptide
VEVQPQLEM

SEQ ID NO: 1202 - protein, 12 aa, synthetic construct
  REGION 1..12: note = Description of sequence: epitope presenting peptide
LEMELTPVVQTI

SEQ ID NO: 1203 - protein, 9 aa, synthetic construct
  REGION 1..9: note = Description of sequence: epitope presenting peptide
LEMELTPVV

SEQ ID NO: 1204 - protein, 10 aa, synthetic construct
  REGION 1..10: note = Description of sequence: epitope presenting peptide
YENFNQHEVL

SEQ ID NO: 1205 - protein, 9 aa, synthetic construct
  REGION 1..9: note = Description of sequence: epitope presenting peptide
YEFNQHEVL

SEQ ID NO: 1206 - protein, 9 aa, synthetic construct
  REGION 1..9: note = Description of sequence: epitope presenting peptide
HEVLLAPLL

SEQ ID NO: 1207 - protein, 9 aa, synthetic construct
  REGION 1..9: note = Description of sequence: epitope presenting peptide
NETLVTMPL

SEQ ID NO: 1208 - protein, 9 aa, synthetic construct
  REGION 1..9: note = Description of sequence: epitope presenting peptide
GEVITFDNL

SEQ ID NO: 1209 - protein, 11 aa, synthetic construct
  REGION 1..11: note = Description of sequence: epitope presenting peptide
SLREVRTIKVF

SEQ ID NO: 1210 - protein, 9 aa, synthetic construct
  REGION 1..9: note = Description of sequence: epitope presenting peptide
HEGKTFYVL

SEQ ID NO: 1211 - protein, 10 aa, synthetic construct
  REGION 1..10: note = Description of sequence: epitope presenting peptide
IELKFNPPAL

SEQ ID NO: 1212 - protein, 9 aa, synthetic construct
  REGION 1..9: note = Description of sequence: epitope presenting peptide
GEAANFCAL

SEQ ID NO: 1213 - protein, 10 aa, synthetic construct
  REGION 1..10: note = Description of sequence: epitope presenting peptide
YEQFKKGVQI

SEQ ID NO: 1214 - protein, 9 aa, synthetic construct
  REGION 1..9: note = Description of sequence: epitope presenting peptide
YEFKKGVQI

SEQ ID NO: 1215 - protein, 12 aa, synthetic construct
  REGION 1..12: note = Description of sequence: epitope presenting peptide
SEYKGPITDVFY

SEQ ID NO: 1216 - protein, 9 aa, synthetic construct
  REGION 1..9: note = Description of sequence: epitope presenting peptide
KENSYTTTI

SEQ ID NO: 1217 - protein, 9 aa, synthetic construct
  REGION 1..9: note = Description of sequence: epitope presenting peptide
TEVVGDIIL

SEQ ID NO: 1218 - protein, 9 aa, synthetic construct
  REGION 1..9: note = Description of sequence: epitope presenting peptide
NELSRVLGL

SEQ ID NO: 1219 - protein, 10 aa, synthetic construct
  REGION 1..10: note = Description of sequence: epitope presenting peptide
AEWFLAYILF

SEQ ID NO: 1220 - protein, 11 aa, synthetic construct
  REGION 1..11: note = Description of sequence: epitope presenting peptide
AEAELAKNVSL

SEQ ID NO: 1221 - protein, 13 aa, synthetic construct
  REGION 1..13: note = Description of sequence: epitope presenting peptide
AELAKNVSLDNVL

SEQ ID NO: 1222 - protein, 9 aa, synthetic construct
  REGION 1..9: note = Description of sequence: epitope presenting peptide
VENMTPRDL

SEQ ID NO: 1223 - protein, 9 aa, synthetic construct
  REGION 1..9: note = Description of sequence: epitope presenting peptide
HEETIYNLL

SEQ ID NO: 1224 - protein, 9 aa, synthetic construct
  REGION 1..9: note = Description of sequence: epitope presenting peptide
AESHVDTDL

SEQ ID NO: 1225 - protein, 10 aa, synthetic construct
  REGION 1..10: note = Description of sequence: epitope presenting peptide
HEFCSQHTML

SEQ ID NO: 1226 - protein, 9 aa, synthetic construct
  REGION 1..9: note = Description of sequence: epitope presenting peptide
HEFSQHTML

SEQ ID NO: 1227 - protein, 11 aa, synthetic construct
  REGION 1..11: note = Description of sequence: epitope presenting peptide
YEAMYTPHTVL

SEQ ID NO: 1228 - protein, 9 aa, synthetic construct
  REGION 1..9: note = Description of sequence: epitope presenting peptide
YEYTPHTVL

SEQ ID NO: 1229 - protein, 9 aa, synthetic construct
  REGION 1..9: note = Description of sequence: epitope presenting peptide
FEYVSQPFL

SEQ ID NO: 1230 - protein, 9 aa, synthetic construct
  REGION 1..9: note = Description of sequence: epitope presenting peptide
GEVFNATRF

SEQ ID NO: 1231 - protein, 10 aa, synthetic construct
  REGION 1..10: note = Description of sequence: epitope presenting peptide
VEAEVQIDRL

SEQ ID NO: 1232 - protein, 9 aa, synthetic construct
  REGION 1..9: note = Description of sequence: epitope presenting peptide
VEAEVQIRL

SEQ ID NO: 1233 - protein, 9 aa, synthetic construct
  REGION 1..9: note = Description of sequence: epitope presenting peptide
AEVQIDRLI

SEQ ID NO: 1234 - protein, 9 aa, synthetic construct
  REGION 1..9: note = Description of sequence: epitope presenting peptide
AEIRASANL

SEQ ID NO: 1235 - protein, 9 aa, synthetic construct
  REGION 1..9: note = Description of sequence: epitope presenting peptide
KEIDRLNEV

SEQ ID NO: 1236 - protein, 13 aa, synthetic construct
  REGION 1..13: note = Description of sequence: epitope presenting peptide
REVLSDRELHLSW

SEQ ID NO: 1237 - protein, 10 aa, synthetic construct
  REGION 1..10: note = Description of sequence: epitope presenting peptide
GEYTFEKGDY

SEQ ID NO: 1238 - protein, 9 aa, synthetic construct
  REGION 1..9: note = Description of sequence: epitope presenting peptide
DEISMATNY

SEQ ID NO: 1239 - protein, 10 aa, synthetic construct
  REGION 1..10: note = Description of sequence: epitope presenting peptide
REFLTRNPAW

SEQ ID NO: 1240 - protein, 10 aa, synthetic construct
  REGION 1..10: note = Description of sequence: epitope presenting peptide
EELKKLLEQW

SEQ ID NO: 1241 - protein, 8 aa, synthetic construct
  REGION 1..8: note = Description of sequence: epitope presenting peptide
AELEGIQY

SEQ ID NO: 1242 - protein, 8 aa, synthetic construct
  REGION 1..8: note = Description of sequence: epitope presenting peptide
AENVTGLF

SEQ ID NO: 1243 - protein, 8 aa, synthetic construct
  REGION 1..8: note = Description of sequence: epitope presenting peptide
AENVTGLF

SEQ ID NO: 1244 - protein, 11 aa, synthetic construct
  REGION 1..11: note = Description of sequence: epitope presenting peptide
REEAIRHVRAW

SEQ ID NO: 1245 - protein, 9 aa, synthetic construct
  REGION 1..9: note = Description of sequence: epitope presenting peptide
FELTSMKYF

SEQ ID NO: 1246 - protein, 10 aa, synthetic construct
  REGION 1..10: note = Description of sequence: epitope presenting peptide
GEAVKTQFNY

SEQ ID NO: 1247 - protein, 8 aa, synthetic construct
  REGION 1..8: note = Description of sequence: epitope presenting peptide
TEISFMLW

SEQ ID NO: 1248 - protein, 12 aa, synthetic construct
  REGION 1..12: note = Description of sequence: epitope presenting peptide
KENDSKEGFFTY

SEQ ID NO: 1249 - protein, 10 aa, synthetic construct
  REGION 1..10: note = Description of sequence: epitope presenting peptide
REHEHEIAWY

SEQ ID NO: 1250 - protein, 9 aa, synthetic construct
  REGION 1..9: note = Description of sequence: epitope presenting peptide
FEIKLAKKF

SEQ ID NO: 1251 - protein, 12 aa, synthetic construct
  REGION 1..12: note = Description of sequence: epitope presenting peptide
SEVGPEHSLAEY

SEQ ID NO: 1252 - protein, 10 aa, synthetic construct
  REGION 1..10: note = Description of sequence: epitope presenting peptide
EEIAIILASF

SEQ ID NO: 1253 - protein, 10 aa, synthetic construct
  REGION 1..10: note = Description of sequence: epitope presenting peptide
YEKLKPVLDW

SEQ ID NO: 1254 - protein, 10 aa, synthetic construct
  REGION 1..10: note = Description of sequence: epitope presenting peptide
EEKFKEGVEF

SEQ ID NO: 1255 - protein, 9 aa, synthetic construct
  REGION 1..9: note = Description of sequence: epitope presenting peptide
LEIKDTEKY

SEQ ID NO: 1256 - protein, 13 aa, synthetic construct
  REGION 1..13: note = Description of sequence: epitope presenting peptide
SEAGVCVSTSGRW

SEQ ID NO: 1257 - protein, 9 aa, synthetic construct
  REGION 1..9: note = Description of sequence: epitope presenting peptide
SEAGVSGRW

SEQ ID NO: 1258 - protein, 10 aa, synthetic construct
  REGION 1..10: note = Description of sequence: epitope presenting peptide
ASEFSSLPSY

SEQ ID NO: 1259 - protein, 9 aa, synthetic construct
  REGION 1..9: note = Description of sequence: epitope presenting peptide
MDNSPNLAW

SEQ ID NO: 1260 - protein, 9 aa, synthetic construct
  REGION 1..9: note = Description of sequence: epitope presenting peptide
TELEPPCRF

SEQ ID NO: 1261 - protein, 13 aa, synthetic construct
  REGION 1..13: note = Description of sequence: epitope presenting peptide
QELIRQGTDYKHW

SEQ ID NO: 1262 - protein, 9 aa, synthetic construct
  REGION 1..9: note = Description of sequence: epitope presenting peptide
QELTDYKHW

SEQ ID NO: 1263 - protein, 13 aa, synthetic construct
  REGION 1..13: note = Description of sequence: epitope presenting peptide
SRIGMEVTPSGTW

SEQ ID NO: 1264 - protein, 9 aa, synthetic construct
  REGION 1..9: note = Description of sequence: epitope presenting peptide
SEVTPSGTW

SEQ ID NO: 1265 - protein, 11 aa, synthetic construct
  REGION 1..11: note = Description of sequence: epitope presenting peptide
GMEVTPSGTWL

SEQ ID NO: 1266 - protein, 10 aa, synthetic construct
  REGION 1..10: note = Description of sequence: epitope presenting peptide
GLEAPFLYLY

SEQ ID NO: 1267 - protein, 14 aa, synthetic construct
  REGION 1..14: note = Description of sequence: epitope presenting peptide
SEHDYQIGGYTEKW

SEQ ID NO: 1268 - protein, 9 aa, synthetic construct
  REGION 1..9: note = Description of sequence: epitope presenting peptide
EEHVQIHTI

SEQ ID NO: 1269 - protein, 9 aa, synthetic construct
  REGION 1..9: note = Description of sequence: epitope presenting peptide
DEWSMATYY

SEQ ID NO: 1270 - protein, 10 aa, synthetic construct
  REGION 1..10: note = Description of sequence: epitope presenting peptide
GEFKLASHMY

SEQ ID NO: 1271 - protein, 14 aa, synthetic construct
  REGION 1..14: note = Description of sequence: epitope presenting peptide
GDCEEEEFEPSTQY

SEQ ID NO: 1272 - protein, 12 aa, synthetic construct
  REGION 1..12: note = Description of sequence: epitope presenting peptide
EEEFEPSTQYEY

SEQ ID NO: 1273 - protein, 9 aa, synthetic construct
  REGION 1..9: note = Description of sequence: epitope presenting peptide
IEVNSFSGY

SEQ ID NO: 1274 - protein, 9 aa, synthetic construct
  REGION 1..9: note = Description of sequence: epitope presenting peptide
SEKQVEQKI

SEQ ID NO: 1275 - protein, 11 aa, synthetic construct
  REGION 1..11: note = Description of sequence: epitope presenting peptide
AEIPKEEVKPF

SEQ ID NO: 1276 - protein, 13 aa, synthetic construct
  REGION 1..13: note = Description of sequence: epitope presenting peptide
SNEKQEILGTVSW

SEQ ID NO: 1277 - protein, 11 aa, synthetic construct
  REGION 1..11: note = Description of sequence: epitope presenting peptide
QEGVVDYGARF

SEQ ID NO: 1278 - protein, 12 aa, synthetic construct
  REGION 1..12: note = Description of sequence: epitope presenting peptide
GELGDVRETMSY

SEQ ID NO: 1279 - protein, 12 aa, synthetic construct
  REGION 1..12: note = Description of sequence: epitope presenting peptide
SEYTGNYQCGHY

SEQ ID NO: 1280 - protein, 11 aa, synthetic construct
  REGION 1..11: note = Description of sequence: epitope presenting peptide
TEIDPKLDNYY

SEQ ID NO: 1281 - protein, 11 aa, synthetic construct
  REGION 1..11: note = Description of sequence: epitope presenting peptide
AEVAVKMFDAY

SEQ ID NO: 1282 - protein, 14 aa, synthetic construct
  REGION 1..14: note = Description of sequence: epitope presenting peptide
TVYSDVENPHLMGW

SEQ ID NO: 1283 - protein, 9 aa, synthetic construct
  REGION 1..9: note = Description of sequence: epitope presenting peptide
TENPHLMGW

SEQ ID NO: 1284 - protein, 11 aa, synthetic construct
  REGION 1..11: note = Description of sequence: epitope presenting peptide
SDVENPHLMGW

SEQ ID NO: 1285 - protein, 10 aa, synthetic construct
  REGION 1..10: note = Description of sequence: epitope presenting peptide
SETKCTLKSF

SEQ ID NO: 1286 - protein, 11 aa, synthetic construct
  REGION 1..11: note = Description of sequence: epitope presenting peptide
QEVFAQVKQIY

SEQ ID NO: 1287 - protein, 9 aa, synthetic construct
  REGION 1..9: note = Description of sequence: epitope presenting peptide
ADAGFIKQY

SEQ ID NO: 1288 - protein, 12 aa, synthetic construct
  REGION 1..12: note = Description of sequence: epitope presenting peptide
QELGKYEQYIKW

SEQ ID NO: 1289 - protein, 9 aa, synthetic construct
  REGION 1..9: note = Description of sequence: epitope presenting peptide
YEQYIKWPW

SEQ ID NO: 1290 - protein, 12 aa, synthetic construct
  REGION 1..12: note = Description of sequence: epitope presenting peptide
AEIVDTVSALVY

SEQ ID NO: 1291 - protein, 11 aa, synthetic construct
  REGION 1..11: note = Description of sequence: epitope presenting peptide
RELNGGAYTRY

SEQ ID NO: 1292 - protein, 9 aa, synthetic construct
  REGION 1..9: note = Description of sequence: epitope presenting peptide
RELNGGARY

SEQ ID NO: 1293 - protein, 11 aa, synthetic construct
  REGION 1..11: note = Description of sequence: epitope presenting peptide
SYEDQDALFAY

SEQ ID NO: 1294 - protein, 8 aa, synthetic construct
  REGION 1..8: note = Description of sequence: epitope presenting peptide
AEHVNNSY

SEQ ID NO: 1295 - protein, 9 aa, synthetic construct
  REGION 1..9: note = Description of sequence: epitope presenting peptide
SEETGTLIV

SEQ ID NO: 1296 - protein, 9 aa, synthetic construct
  REGION 1..9: note = Description of sequence: epitope presenting peptide
VPMEKLKTL

SEQ ID NO: 1297 - protein, 9 aa, synthetic construct
  REGION 1..9: note = Description of sequence: epitope presenting peptide
RTNVYLAVF

SEQ ID NO: 1298 - protein, 8 aa, synthetic construct
  REGION 1..8: note = Description of sequence: epitope presenting peptide
FLAFVVFL

SEQ ID NO: 1299 - protein, 10 aa, synthetic construct
  REGION 1..10: note = Description of sequence: epitope presenting peptide
ISLAGSYKDW

SEQ ID NO: 1300 - protein, 9 aa, synthetic construct
  REGION 1..9: note = Description of sequence: epitope presenting peptide
FLLVTLAIL

SEQ ID NO: 1301 - protein, 9 aa, synthetic construct
  REGION 1..9: note = Description of sequence: epitope presenting peptide
TSNPTTFHL

SEQ ID NO: 1302 - protein, 10 aa, synthetic construct
  REGION 1..10: note = Description of sequence: epitope presenting peptide
FYVYSRVKNL

SEQ ID NO: 1303 - protein, 9 aa, synthetic construct
  REGION 1..9: note = Description of sequence: epitope presenting peptide
ITFDNLKTL

SEQ ID NO: 1304 - protein, 9 aa, synthetic construct
  REGION 1..9: note = Description of sequence: epitope presenting peptide
MSMTYGQQF

SEQ ID NO: 1305 - protein, 9 aa, synthetic construct
  REGION 1..9: note = Description of sequence: epitope presenting peptide
LVKPSFYVY

SEQ ID NO: 1306 - protein, 10 aa, synthetic construct
  REGION 1..10: note = Description of sequence: epitope presenting peptide
MSALNHTKKW

SEQ ID NO: 1307 - protein, 9 aa, synthetic construct
  REGION 1..9: note = Description of sequence: epitope presenting peptide
WICLLQFAY

SEQ ID NO: 1308 - protein, 9 aa, synthetic construct
  REGION 1..9: note = Description of sequence: epitope presenting peptide
SALNHTKKW

SEQ ID NO: 1309 - protein, 13 aa, synthetic construct
  REGION 1..13: note = Description of sequence: epitope presenting peptide
LQFAYANRNRFLY

SEQ ID NO: 1310 - protein, 10 aa, synthetic construct
  REGION 1..10: note = Description of sequence: epitope presenting peptide
NKATYKPNTW

SEQ ID NO: 1311 - protein, 10 aa, synthetic construct
  REGION 1..10: note = Description of sequence: epitope presenting peptide
LAAVYRINWI

SEQ ID NO: 1312 - protein, 10 aa, synthetic construct
  REGION 1..10: note = Description of sequence: epitope presenting peptide
LTAFGLVAEW

SEQ ID NO: 1313 - protein, 11 aa, synthetic construct
  REGION 1..11: note = Description of sequence: epitope presenting peptide
AIAMACLVGLM

SEQ ID NO: 1314 - protein, 9 aa, synthetic construct
  REGION 1..9: note = Description of sequence: epitope presenting peptide
AVHFISNSW

SEQ ID NO: 1315 - protein, 10 aa, synthetic construct
  REGION 1..10: note = Description of sequence: epitope presenting peptide
RLFARTRSMW

SEQ ID NO: 1316 - protein, 12 aa, synthetic construct
  REGION 1..12: note = Description of sequence: epitope presenting peptide
SMWSFNPETNIL

SEQ ID NO: 1317 - protein, 10 aa, synthetic construct
  REGION 1..10: note = Description of sequence: epitope presenting peptide
AKSHNIALIW

SEQ ID NO: 1318 - protein, 11 aa, synthetic construct
  REGION 1..11: note = Description of sequence: epitope presenting peptide
HLRIAGHHLGR

SEQ ID NO: 1319 - protein, 9 aa, synthetic construct
  REGION 1..9: note = Description of sequence: epitope presenting peptide
NSFSGYLKL

SEQ ID NO: 1320 - protein, 12 aa, synthetic construct
  REGION 1..12: note = Description of sequence: epitope presenting peptide
TVATSRTLSYYK

SEQ ID NO: 1321 - protein, 9 aa, synthetic construct
  REGION 1..9: note = Description of sequence: epitope presenting peptide
AHAEETRKL

SEQ ID NO: 1322 - protein, 9 aa, synthetic construct
  REGION 1..9: note = Description of sequence: epitope presenting peptide
LHKPIVWHV

SEQ ID NO: 1323 - protein, 10 aa, synthetic construct
  REGION 1..10: note = Description of sequence: epitope presenting peptide
TVATSRTLSY

SEQ ID NO: 1324 - protein, 9 aa, synthetic construct
  REGION 1..9: note = Description of sequence: epitope presenting peptide
YAKPFLNKV

SEQ ID NO: 1325 - protein, 10 aa, synthetic construct
  REGION 1..10: note = Description of sequence: epitope presenting peptide
VATSRTLSYY

SEQ ID NO: 1326 - protein, 9 aa, synthetic construct
  REGION 1..9: note = Description of sequence: epitope presenting peptide
VKNGSIHLY

SEQ ID NO: 1327 - protein, 9 aa, synthetic construct
  REGION 1..9: note = Description of sequence: epitope presenting peptide
AGDSGFAAY

SEQ ID NO: 1328 - protein, 9 aa, synthetic construct
  REGION 1..9: note = Description of sequence: epitope presenting peptide
ERHSLSHFV

SEQ ID NO: 1329 - protein, 9 aa, synthetic construct
  REGION 1..9: note = Description of sequence: epitope presenting peptide
ATSRTLSYY

SEQ ID NO: 1330 - protein, 9 aa, synthetic construct
  REGION 1..9: note = Description of sequence: epitope presenting peptide
FYYVWKSYV

SEQ ID NO: 1331 - protein, 11 aa, synthetic construct
  REGION 1..11: note = Description of sequence: epitope presenting peptide
RVAGDSGFAAY

SEQ ID NO: 1332 - protein, 9 aa, synthetic construct
  REGION 1..9: note = Description of sequence: epitope presenting peptide
LRVEAFEYY

SEQ ID NO: 1333 - protein, 9 aa, synthetic construct
  REGION 1..9: note = Description of sequence: epitope presenting peptide
WKYPQVNGL

SEQ ID NO: 1334 - protein, 9 aa, synthetic construct
  REGION 1..9: note = Description of sequence: epitope presenting peptide
VATSRTLSY

SEQ ID NO: 1335 - protein, 9 aa, synthetic construct
  REGION 1..9: note = Description of sequence: epitope presenting peptide
ARAGEAANF

SEQ ID NO: 1336 - protein, 9 aa, synthetic construct
  REGION 1..9: note = Description of sequence: epitope presenting peptide
VRETMSYLF

SEQ ID NO: 1337 - protein, 9 aa, synthetic construct
  REGION 1..9: note = Description of sequence: epitope presenting peptide
FLFLTWICL

SEQ ID NO: 1338 - protein, 9 aa, synthetic construct
  REGION 1..9: note = Description of sequence: epitope presenting peptide
SAPPAQYEL

SEQ ID NO: 1339 - protein, 10 aa, synthetic construct
  REGION 1..10: note = Description of sequence: epitope presenting peptide
FLWLLWPVTL

SEQ ID NO: 1340 - protein, 9 aa, synthetic construct
  REGION 1..9: note = Description of sequence: epitope presenting peptide
SRVLGLKTL

SEQ ID NO: 1341 - protein, 9 aa, synthetic construct
  REGION 1..9: note = Description of sequence: epitope presenting peptide
WLLWPVTLA

SEQ ID NO: 1342 - protein, 9 aa, synthetic construct
  REGION 1..9: note = Description of sequence: epitope presenting peptide
HLDGEVITF

SEQ ID NO: 1343 - protein, 9 aa, synthetic construct
  REGION 1..9: note = Description of sequence: epitope presenting peptide
LLWPVTLAC

SEQ ID NO: 1344 - protein, 9 aa, synthetic construct
  REGION 1..9: note = Description of sequence: epitope presenting peptide
NYYKKDNSY

SEQ ID NO: 1345 - protein, 8 aa, synthetic construct
  REGION 1..8: note = Description of sequence: epitope presenting peptide
YYKKDNSY

SEQ ID NO: 1346 - protein, 9 aa, synthetic construct
  REGION 1..9: note = Description of sequence: epitope presenting peptide
KFADDLNQL

SEQ ID NO: 1347 - protein, 9 aa, synthetic construct
  REGION 1..9: note = Description of sequence: epitope presenting peptide
SMWSFNPET

SEQ ID NO: 1348 - protein, 8 aa, synthetic construct
  REGION 1..8: note = Description of sequence: epitope presenting peptide
FYYVWKSY

SEQ ID NO: 1349 - protein, 9 aa, synthetic construct
  REGION 1..9: note = Description of sequence: epitope presenting peptide
FVLAAVYRI

SEQ ID NO: 1350 - protein, 10 aa, synthetic construct
  REGION 1..10: note = Description of sequence: epitope presenting peptide
YFDKAGQKTY

SEQ ID NO: 1351 - protein, 8 aa, synthetic construct
  REGION 1..8: note = Description of sequence: epitope presenting peptide
AYANRNRF

SEQ ID NO: 1352 - protein, 9 aa, synthetic construct
  REGION 1..9: note = Description of sequence: epitope presenting peptide
AYANRNRFL

SEQ ID NO: 1353 - protein, 9 aa, synthetic construct
  REGION 1..9: note = Description of sequence: epitope presenting peptide
SNSGSDVLY

SEQ ID NO: 1354 - protein, 10 aa, synthetic construct
  REGION 1..10: note = Description of sequence: epitope presenting peptide
RFLYIIKLIF

SEQ ID NO: 1355 - protein, 8 aa, synthetic construct
  REGION 1..8: note = Description of sequence: epitope presenting peptide
YLITPVHV

SEQ ID NO: 1356 - protein, 9 aa, synthetic construct
  REGION 1..9: note = Description of sequence: epitope presenting peptide
RYRIGNYKL

SEQ ID NO: 1357 - protein, 9 aa, synthetic construct
  REGION 1..9: note = Description of sequence: epitope presenting peptide
RNRFLYIIK

SEQ ID NO: 1358 - protein, 10 aa, synthetic construct
  REGION 1..10: note = Description of sequence: epitope presenting peptide
YSRYRIGNYK

SEQ ID NO: 1359 - protein, 8 aa, synthetic construct
  REGION 1..8: note = Description of sequence: epitope presenting peptide
FLPGVYSV

SEQ ID NO: 1360 - protein, 14 aa, synthetic construct
  REGION 1..14: note = Description of sequence: epitope presenting peptide
RVAGDSGFAAYSRY

SEQ ID NO: 1361 - protein, 10 aa, synthetic construct
  REGION 1..10: note = Description of sequence: epitope presenting peptide
YLTNDVSFLA

SEQ ID NO: 1362 - protein, 9 aa, synthetic construct
  REGION 1..9: note = Description of sequence: epitope presenting peptide
LSYFIASFR

SEQ ID NO: 1363 - protein, 9 aa, synthetic construct
  REGION 1..9: note = Description of sequence: epitope presenting peptide
IASFRLFAR

SEQ ID NO: 1364 - protein, 10 aa, synthetic construct
  REGION 1..10: note = Description of sequence: epitope presenting peptide
NGTITVEELK

SEQ ID NO: 1365 - protein, 9 aa, synthetic construct
  REGION 1..9: note = Description of sequence: epitope presenting peptide
FVVPGLPGT

SEQ ID NO: 1366 - protein, 10 aa, synthetic construct
  REGION 1..10: note = Description of sequence: epitope presenting peptide
ELVIGAVILR

SEQ ID NO: 1367 - protein, 9 aa, synthetic construct
  REGION 1..9: note = Description of sequence: epitope presenting peptide
YFMRFRRAF

SEQ ID NO: 1368 - protein, 9 aa, synthetic construct
  REGION 1..9: note = Description of sequence: epitope presenting peptide
LVIGAVILR

SEQ ID NO: 1369 - protein, 9 aa, synthetic construct
  REGION 1..9: note = Description of sequence: epitope presenting peptide
SFLPGVYSV

SEQ ID NO: 1370 - protein, 9 aa, synthetic construct
  REGION 1..9: note = Description of sequence: epitope presenting peptide
AVILRGHLR

SEQ ID NO: 1371 - protein, 9 aa, synthetic construct
  REGION 1..9: note = Description of sequence: epitope presenting peptide
IYLYLTFYL

SEQ ID NO: 1372 - protein, 9 aa, synthetic construct
  REGION 1..9: note = Description of sequence: epitope presenting peptide
DSGFAAYSR

SEQ ID NO: 1373 - protein, 9 aa, synthetic construct
  REGION 1..9: note = Description of sequence: epitope presenting peptide
SSSDNIALL

SEQ ID NO: 1374 - protein, 9 aa, synthetic construct
  REGION 1..9: note = Description of sequence: epitope presenting peptide
GSVAYESLR

SEQ ID NO: 1375 - protein, 8 aa, synthetic construct
  REGION 1..8: note = Description of sequence: epitope presenting peptide
RPLLESEL

SEQ ID NO: 1376 - protein, 9 aa, synthetic construct
  REGION 1..9: note = Description of sequence: epitope presenting peptide
WVLNNDYYR

SEQ ID NO: 1377 - protein, 9 aa, synthetic construct
  REGION 1..9: note = Description of sequence: epitope presenting peptide
LPKEITVAT

SEQ ID NO: 1378 - protein, 9 aa, synthetic construct
  REGION 1..9: note = Description of sequence: epitope presenting peptide
LAYYFMRFR

SEQ ID NO: 1379 - protein, 9 aa, synthetic construct
  REGION 1..9: note = Description of sequence: epitope presenting peptide
ANRNRFLYI

SEQ ID NO: 1380 - protein, 9 aa, synthetic construct
  REGION 1..9: note = Description of sequence: epitope presenting peptide
WFFSNYLKR

SEQ ID NO: 1381 - protein, 10 aa, synthetic construct
  REGION 1..10: note = Description of sequence: epitope presenting peptide
FRLFARTRSM

SEQ ID NO: 1382 - protein, 9 aa, synthetic construct
  REGION 1..9: note = Description of sequence: epitope presenting peptide
SFNPETNIL

SEQ ID NO: 1383 - protein, 8 aa, synthetic construct
  REGION 1..8: note = Description of sequence: epitope presenting peptide
RPDTRYVL

SEQ ID NO: 1384 - protein, 9 aa, synthetic construct
  REGION 1..9: note = Description of sequence: epitope presenting peptide
NRFLYIIKL

SEQ ID NO: 1385 - protein, 10 aa, synthetic construct
  REGION 1..10: note = Description of sequence: epitope presenting peptide
SQRVAGDSGF

SEQ ID NO: 1386 - protein, 8 aa, synthetic construct
  REGION 1..8: note = Description of sequence: epitope presenting peptide
YLKRRVVF

SEQ ID NO: 1387 - protein, 10 aa, synthetic construct
  REGION 1..10: note = Description of sequence: epitope presenting peptide
KQLIKVTLVF

SEQ ID NO: 1388 - protein, 9 aa, synthetic construct
  REGION 1..9: note = Description of sequence: epitope presenting peptide
VLAAECTIF

SEQ ID NO: 1389 - protein, 9 aa, synthetic construct
  REGION 1..9: note = Description of sequence: epitope presenting peptide
SELVIGAVI

SEQ ID NO: 1390 - protein, 8 aa, synthetic construct
  REGION 1..8: note = Description of sequence: epitope presenting peptide
TPSKLIEY

SEQ ID NO: 1391 - protein, 9 aa, synthetic construct
  REGION 1..9: note = Description of sequence: epitope presenting peptide
LAAVYRINW

SEQ ID NO: 1392 - protein, 8 aa, synthetic construct
  REGION 1..8: note = Description of sequence: epitope presenting peptide
AAVYRINW

SEQ ID NO: 1393 - protein, 10 aa, synthetic construct
  REGION 1..10: note = Description of sequence: epitope presenting peptide
TNVLEGSVAY

SEQ ID NO: 1394 - protein, 9 aa, synthetic construct
  REGION 1..9: note = Description of sequence: epitope presenting peptide
MACLVGLMW

SEQ ID NO: 1395 - protein, 8 aa, synthetic construct
  REGION 1..8: note = Description of sequence: epitope presenting peptide
RTRSMWSF

SEQ ID NO: 1396 - protein, 10 aa, synthetic construct
  REGION 1..10: note = Description of sequence: epitope presenting peptide
RNRFLYIIKL

SEQ ID NO: 1397 - protein, 9 aa, synthetic construct
  REGION 1..9: note = Description of sequence: epitope presenting peptide
DVLLPLTQY

SEQ ID NO: 1398 - protein, 10 aa, synthetic construct
  REGION 1..10: note = Description of sequence: epitope presenting peptide
YYRRATRRIR

SEQ ID NO: 1399 - protein, 9 aa, synthetic construct
  REGION 1..9: note = Description of sequence: epitope presenting peptide
SEIIGYKAI

SEQ ID NO: 1400 - protein, 10 aa, synthetic construct
  REGION 1..10: note = Description of sequence: epitope presenting peptide
RIRGGDGKMK

SEQ ID NO: 1401 - protein, 10 aa, synthetic construct
  REGION 1..10: note = Description of sequence: epitope presenting peptide
FGEYSHVVAF

SEQ ID NO: 1402 - protein, 10 aa, synthetic construct
  REGION 1..10: note = Description of sequence: epitope presenting peptide
LSPRWYFYYL

SEQ ID NO: 1403 - protein, 9 aa, synthetic construct
  REGION 1..9: note = Description of sequence: epitope presenting peptide
IAAVITREV

SEQ ID NO: 1404 - protein, 10 aa, synthetic construct
  REGION 1..10: note = Description of sequence: epitope presenting peptide
GTGPEAGLPY

SEQ ID NO: 1405 - protein, 8 aa, synthetic construct
  REGION 1..8: note = Description of sequence: epitope presenting peptide
LPRVFSAV

SEQ ID NO: 1406 - protein, 13 aa, synthetic construct
  REGION 1..13: note = Description of sequence: epitope presenting peptide
ATEGALNTPKDHI

SEQ ID NO: 1407 - protein, 9 aa, synthetic construct
  REGION 1..9: note = Description of sequence: epitope presenting peptide
DAVNLLTNM

SEQ ID NO: 1408 - protein, 11 aa, synthetic construct
  REGION 1..11: note = Description of sequence: epitope presenting peptide
RNPANNAAIVL

SEQ ID NO: 1409 - protein, 8 aa, synthetic construct
  REGION 1..8: note = Description of sequence: epitope presenting peptide
LPGVYSVI

SEQ ID NO: 1410 - protein, 10 aa, synthetic construct
  REGION 1..10: note = Description of sequence: epitope presenting peptide
AEGSRGGSQA

SEQ ID NO: 1411 - protein, 10 aa, synthetic construct
  REGION 1..10: note = Description of sequence: epitope presenting peptide
RTTNGDFLHF

SEQ ID NO: 1412 - protein, 10 aa, synthetic construct
  REGION 1..10: note = Description of sequence: epitope presenting peptide
SQASSRSSSR

SEQ ID NO: 1413 - protein, 8 aa, synthetic construct
  REGION 1..8: note = Description of sequence: epitope presenting peptide
ISTKHFYW

SEQ ID NO: 1414 - protein, 9 aa, synthetic construct
  REGION 1..9: note = Description of sequence: epitope presenting peptide
SSRGTSPAR

SEQ ID NO: 1415 - protein, 8 aa, synthetic construct
  REGION 1..8: note = Description of sequence: epitope presenting peptide
LRPDTRYV

SEQ ID NO: 1416 - protein, 10 aa, synthetic construct
  REGION 1..10: note = Description of sequence: epitope presenting peptide
QQQQGQTVTK

SEQ ID NO: 1417 - protein, 8 aa, synthetic construct
  REGION 1..8: note = Description of sequence: epitope presenting peptide
YRSLPGVF

SEQ ID NO: 1418 - protein, 9 aa, synthetic construct
  REGION 1..9: note = Description of sequence: epitope presenting peptide
FYLITPVHV

SEQ ID NO: 1419 - protein, 13 aa, synthetic construct
  REGION 1..13: note = Description of sequence: epitope presenting peptide
GMEVTPSGTWLTY

SEQ ID NO: 1420 - protein, 10 aa, synthetic construct
  REGION 1..10: note = Description of sequence: epitope presenting peptide
SLRPDTRYVL

SEQ ID NO: 1421 - protein, 9 aa, synthetic construct
  REGION 1..9: note = Description of sequence: epitope presenting peptide
AVLQSGFRK

SEQ ID NO: 1422 - protein, 9 aa, synthetic construct
  REGION 1..9: note = Description of sequence: epitope presenting peptide
FSKQLQQSM

SEQ ID NO: 1423 - protein, 9 aa, synthetic construct
  REGION 1..9: note = Description of sequence: epitope presenting peptide
IQPGQTFSV

SEQ ID NO: 1424 - protein, 9 aa, synthetic construct
  REGION 1..9: note = Description of sequence: epitope presenting peptide
FLNGSCGSV

SEQ ID NO: 1425 - protein, 11 aa, synthetic construct
  REGION 1..11: note = Description of sequence: epitope presenting peptide
SSPDDQIGYYR

SEQ ID NO: 1426 - protein, 9 aa, synthetic construct
  REGION 1..9: note = Description of sequence: epitope presenting peptide
VLAWLYAAV

SEQ ID NO: 1427 - protein, 9 aa, synthetic construct
  REGION 1..9: note = Description of sequence: epitope presenting peptide
NTASWFTAL

SEQ ID NO: 1428 - protein, 10 aa, synthetic construct
  REGION 1..10: note = Description of sequence: epitope presenting peptide
YLGTGPEAGL

SEQ ID NO: 1429 - protein, 9 aa, synthetic construct
  REGION 1..9: note = Description of sequence: epitope presenting peptide
IIWVATEGA

SEQ ID NO: 1430 - protein, 9 aa, synthetic construct
  REGION 1..9: note = Description of sequence: epitope presenting peptide
GTDLEGNFY

SEQ ID NO: 1431 - protein, 10 aa, synthetic construct
  REGION 1..10: note = Description of sequence: epitope presenting peptide
VLQLPQGTTL

SEQ ID NO: 1432 - protein, 8 aa, synthetic construct
  REGION 1..8: note = Description of sequence: epitope presenting peptide
TDLEGNFY

SEQ ID NO: 1433 - protein, 11 aa, synthetic construct
  REGION 1..11: note = Description of sequence: epitope presenting peptide
YMHHMELPTGV

SEQ ID NO: 1434 - protein, 10 aa, synthetic construct
  REGION 1..10: note = Description of sequence: epitope presenting peptide
LLLLDRLNQL

SEQ ID NO: 1435 - protein, 9 aa, synthetic construct
  REGION 1..9: note = Description of sequence: epitope presenting peptide
NPKTPKYKF

SEQ ID NO: 1436 - protein, 9 aa, synthetic construct
  REGION 1..9: note = Description of sequence: epitope presenting peptide
RTATKAYNV

SEQ ID NO: 1437 - protein, 9 aa, synthetic construct
  REGION 1..9: note = Description of sequence: epitope presenting peptide
AQFAPSASA

SEQ ID NO: 1438 - protein, 9 aa, synthetic construct
  REGION 1..9: note = Description of sequence: epitope presenting peptide
KLDDKDPNF

SEQ ID NO: 1439 - protein, 9 aa, synthetic construct
  REGION 1..9: note = Description of sequence: epitope presenting peptide
VRIQPGQTF

SEQ ID NO: 1440 - protein, 9 aa, synthetic construct
  REGION 1..9: note = Description of sequence: epitope presenting peptide
ILLNKHIDA

SEQ ID NO: 1441 - protein, 13 aa, synthetic construct
  REGION 1..13: note = Description of sequence: epitope presenting peptide
FLCLFLLPSLATV

SEQ ID NO: 1442 - protein, 11 aa, synthetic construct
  REGION 1..11: note = Description of sequence: epitope presenting peptide
AADLDDFSKQL

SEQ ID NO: 1443 - protein, 14 aa, synthetic construct
  REGION 1..14: note = Description of sequence: epitope presenting peptide
KTFPPTEPKKDKKK

SEQ ID NO: 1444 - protein, 11 aa, synthetic construct
  REGION 1..11: note = Description of sequence: epitope presenting peptide
TLGVYDYLVST

SEQ ID NO: 1445 - protein, 10 aa, synthetic construct
  REGION 1..10: note = Description of sequence: epitope presenting peptide
KTFPPTEPKK

SEQ ID NO: 1446 - protein, 9 aa, synthetic construct
  REGION 1..9: note = Description of sequence: epitope presenting peptide
FRYMNSQGL

SEQ ID NO: 1447 - protein, 9 aa, synthetic construct
  REGION 1..9: note = Description of sequence: epitope presenting peptide
KTFPPTEPK

SEQ ID NO: 1448 - protein, 10 aa, synthetic construct
  REGION 1..10: note = Description of sequence: epitope presenting peptide
ATEGALNTPK

SEQ ID NO: 1449 - protein, 9 aa, synthetic construct
  REGION 1..9: note = Description of sequence: epitope presenting peptide
FLYENAFLP

SEQ ID NO: 1450 - protein, 9 aa, synthetic construct
  REGION 1..9: note = Description of sequence: epitope presenting peptide
KSAAEASKK

SEQ ID NO: 1451 - protein, 11 aa, synthetic construct
  REGION 1..11: note = Description of sequence: epitope presenting peptide
FLYENAFLPFA

SEQ ID NO: 1452 - protein, 10 aa, synthetic construct
  REGION 1..10: note = Description of sequence: epitope presenting peptide
LFLLPSLATV

SEQ ID NO: 1453 - protein, 11 aa, synthetic construct
  REGION 1..11: note = Description of sequence: epitope presenting peptide
DYKHWPQIAQF

SEQ ID NO: 1454 - protein, 10 aa, synthetic construct
  REGION 1..10: note = Description of sequence: epitope presenting peptide
FLLPSLATVA

SEQ ID NO: 1455 - protein, 8 aa, synthetic construct
  REGION 1..8: note = Description of sequence: epitope presenting peptide
HWPQIAQF

SEQ ID NO: 1456 - protein, 9 aa, synthetic construct
  REGION 1..9: note = Description of sequence: epitope presenting peptide
FLLPSLATV

SEQ ID NO: 1457 - protein, 10 aa, synthetic construct
  REGION 1..10: note = Description of sequence: epitope presenting peptide
QFAPSASAFF

SEQ ID NO: 1458 - protein, 9 aa, synthetic construct
  REGION 1..9: note = Description of sequence: epitope presenting peptide
RIMTWLDMV

SEQ ID NO: 1459 - protein, 10 aa, synthetic construct
  REGION 1..10: note = Description of sequence: epitope presenting peptide
AQFAPSASAF

SEQ ID NO: 1460 - protein, 9 aa, synthetic construct
  REGION 1..9: note = Description of sequence: epitope presenting peptide
ELIRQGTDY

SEQ ID NO: 1461 - protein, 9 aa, synthetic construct
  REGION 1..9: note = Description of sequence: epitope presenting peptide
KLKDCVMYA

SEQ ID NO: 1462 - protein, 11 aa, synthetic construct
  REGION 1..11: note = Description of sequence: epitope presenting peptide
EVTPSGTWLTY

SEQ ID NO: 1463 - protein, 9 aa, synthetic construct
  REGION 1..9: note = Description of sequence: epitope presenting peptide
AGLPYGANK

SEQ ID NO: 1464 - protein, 9 aa, synthetic construct
  REGION 1..9: note = Description of sequence: epitope presenting peptide
GTRNPANNA

SEQ ID NO: 1465 - protein, 9 aa, synthetic construct
  REGION 1..9: note = Description of sequence: epitope presenting peptide
FLARGIVFM

SEQ ID NO: 1466 - protein, 10 aa, synthetic construct
  REGION 1..10: note = Description of sequence: epitope presenting peptide
VTPSGTWLTY

SEQ ID NO: 1467 - protein, 9 aa, synthetic construct
  REGION 1..9: note = Description of sequence: epitope presenting peptide
GVYDYLVST

SEQ ID NO: 1468 - protein, 10 aa, synthetic construct
  REGION 1..10: note = Description of sequence: epitope presenting peptide
SASAFFGMSR

SEQ ID NO: 1469 - protein, 9 aa, synthetic construct
  REGION 1..9: note = Description of sequence: epitope presenting peptide
GLLPPKNSI

SEQ ID NO: 1470 - protein, 10 aa, synthetic construct
  REGION 1..10: note = Description of sequence: epitope presenting peptide
YKTFPPTEPK

SEQ ID NO: 1471 - protein, 9 aa, synthetic construct
  REGION 1..9: note = Description of sequence: epitope presenting peptide
KLNIKLLGV

SEQ ID NO: 1472 - protein, 13 aa, synthetic construct
  REGION 1..13: note = Description of sequence: epitope presenting peptide
GPQNQRNAPRITF

SEQ ID NO: 1473 - protein, 10 aa, synthetic construct
  REGION 1..10: note = Description of sequence: epitope presenting peptide
RPQGLPNNTA

SEQ ID NO: 1474 - protein, 9 aa, synthetic construct
  REGION 1..9: note = Description of sequence: epitope presenting peptide
VYMPASWVM

SEQ ID NO: 1475 - protein, 10 aa, synthetic construct
  REGION 1..10: note = Description of sequence: epitope presenting peptide
VMYASAVVLL

SEQ ID NO: 1476 - protein, 10 aa, synthetic construct
  REGION 1..10: note = Description of sequence: epitope presenting peptide
NPANNAAIVL

SEQ ID NO: 1477 - protein, 10 aa, synthetic construct
  REGION 1..10: note = Description of sequence: epitope presenting peptide
APSASAFFGM

SEQ ID NO: 1478 - protein, 9 aa, synthetic construct
  REGION 1..9: note = Description of sequence: epitope presenting peptide
FPRGQGVPI

SEQ ID NO: 1479 - protein, 9 aa, synthetic construct
  REGION 1..9: note = Description of sequence: epitope presenting peptide
MPASWVMRI

SEQ ID NO: 1480 - protein, 9 aa, synthetic construct
  REGION 1..9: note = Description of sequence: epitope presenting peptide
KPRQKRTAT

SEQ ID NO: 1481 - protein, 9 aa, synthetic construct
  REGION 1..9: note = Description of sequence: epitope presenting peptide
YASAVVLLI

SEQ ID NO: 1482 - protein, 9 aa, synthetic construct
  REGION 1..9: note = Description of sequence: epitope presenting peptide
LLNKHIDAY

SEQ ID NO: 1483 - protein, 8 aa, synthetic construct
  REGION 1..8: note = Description of sequence: epitope presenting peptide
NRYFRLTL

SEQ ID NO: 1484 - protein, 9 aa, synthetic construct
  REGION 1..9: note = Description of sequence: epitope presenting peptide
QRNAPRITF

SEQ ID NO: 1485 - protein, 9 aa, synthetic construct
  REGION 1..9: note = Description of sequence: epitope presenting peptide
MFVKHKHAF

SEQ ID NO: 1486 - protein, 9 aa, synthetic construct
  REGION 1..9: note = Description of sequence: epitope presenting peptide
SPDDQIGYY

SEQ ID NO: 1487 - protein, 9 aa, synthetic construct
  REGION 1..9: note = Description of sequence: epitope presenting peptide
FAPSASAFF

SEQ ID NO: 1488 - protein, 9 aa, synthetic construct
  REGION 1..9: note = Description of sequence: epitope presenting peptide
SLLSVLLSM

SEQ ID NO: 1489 - protein, 9 aa, synthetic construct
  REGION 1..9: note = Description of sequence: epitope presenting peptide
EAFEKMVSL

SEQ ID NO: 1490 - protein, 10 aa, synthetic construct
  REGION 1..10: note = Description of sequence: epitope presenting peptide
FTYASALWEI

SEQ ID NO: 1491 - protein, 10 aa, synthetic construct
  REGION 1..10: note = Description of sequence: epitope presenting peptide
QELIRQGTDY

SEQ ID NO: 1492 - protein, 9 aa, synthetic construct
  REGION 1..9: note = Description of sequence: epitope presenting peptide
MEVTPSGTW

SEQ ID NO: 1493 - protein, 10 aa, synthetic construct
  REGION 1..10: note = Description of sequence: epitope presenting peptide
LPYGANKDGI

SEQ ID NO: 1494 - protein, 10 aa, synthetic construct
  REGION 1..10: note = Description of sequence: epitope presenting peptide
NTCDGTTFTY

SEQ ID NO: 1495 - protein, 10 aa, synthetic construct
  REGION 1..10: note = Description of sequence: epitope presenting peptide
QGLPNNTASW

SEQ ID NO: 1496 - protein, 10 aa, synthetic construct
  REGION 1..10: note = Description of sequence: epitope presenting peptide
SALWEIQQVV

SEQ ID NO: 1497 - protein, 9 aa, synthetic construct
  REGION 1..9: note = Description of sequence: epitope presenting peptide
KMKDLSPRW

SEQ ID NO: 1498 - protein, 8 aa, synthetic construct
  REGION 1..8: note = Description of sequence: epitope presenting peptide
ALWEIQQV

SEQ ID NO: 1499 - protein, 10 aa, synthetic construct
  REGION 1..10: note = Description of sequence: epitope presenting peptide
YGANKDGIIW

SEQ ID NO: 1500 - protein, 9 aa, synthetic construct
  REGION 1..9: note = Description of sequence: epitope presenting peptide
MKDLSPRWY

SEQ ID NO: 1501 - protein, 11 aa, synthetic construct
  REGION 1..11: note = Description of sequence: epitope presenting peptide
TYKNTCDGTTF

SEQ ID NO: 1502 - protein, 11 aa, synthetic construct
  REGION 1..11: note = Description of sequence: epitope presenting peptide
RRGPEQTQGNF

SEQ ID NO: 1503 - protein, 9 aa, synthetic construct
  REGION 1..9: note = Description of sequence: epitope presenting peptide
TFTYASALW

SEQ ID NO: 1504 - protein, 9 aa, synthetic construct
  REGION 1..9: note = Description of sequence: epitope presenting peptide
KKQQTVTLL

SEQ ID NO: 1505 - protein, 9 aa, synthetic construct
  REGION 1..9: note = Description of sequence: epitope presenting peptide
AWPLIVTAL

SEQ ID NO: 1506 - protein, 9 aa, synthetic construct
  REGION 1..9: note = Description of sequence: epitope presenting peptide
VLSEARQHL

SEQ ID NO: 1507 - protein, 8 aa, synthetic construct
  REGION 1..8: note = Description of sequence: epitope presenting peptide
LKKLKKSL

SEQ ID NO: 1508 - protein, 11 aa, synthetic construct
  REGION 1..11: note = Description of sequence: epitope presenting peptide
KMADQAMTQMY

SEQ ID NO: 1509 - protein, 11 aa, synthetic construct
  REGION 1..11: note = Description of sequence: epitope presenting peptide
LMVVIPDYNTY

SEQ ID NO: 1510 - protein, 9 aa, synthetic construct
  REGION 1..9: note = Description of sequence: epitope presenting peptide
VPHVGEIPV

SEQ ID NO: 1511 - protein, 9 aa, synthetic construct
  REGION 1..9: note = Description of sequence: epitope presenting peptide
SEFSSLPSY

SEQ ID NO: 1512 - protein, 10 aa, synthetic construct
  REGION 1..10: note = Description of sequence: epitope presenting peptide
IPVAYRKVLL

SEQ ID NO: 1513 - protein, 9 aa, synthetic construct
  REGION 1..9: note = Description of sequence: epitope presenting peptide
HLKDGTCGL

SEQ ID NO: 1514 - protein, 9 aa, synthetic construct
  REGION 1..9: note = Description of sequence: epitope presenting peptide
CTDDNALAY

SEQ ID NO: 1515 - protein, 8 aa, synthetic construct
  REGION 1..8: note = Description of sequence: epitope presenting peptide
SDGTGTIY

SEQ ID NO: 1516 - protein, 10 aa, synthetic construct
  REGION 1..10: note = Description of sequence: epitope presenting peptide
TVLSFCAFAV

SEQ ID NO: 1517 - protein, 10 aa, synthetic construct
  REGION 1..10: note = Description of sequence: epitope presenting peptide
YTELEPPCRF

SEQ ID NO: 1518 - protein, 11 aa, synthetic construct
  REGION 1..11: note = Description of sequence: epitope presenting peptide
YLYFIKGLNNL

SEQ ID NO: 1519 - protein, 8 aa, synthetic construct
  REGION 1..8: note = Description of sequence: epitope presenting peptide
VPANSTVL

SEQ ID NO: 1520 - protein, 9 aa, synthetic construct
  REGION 1..9: note = Description of sequence: epitope presenting peptide
VTDTPKGPK

SEQ ID NO: 1521 - protein, 14 aa, synthetic construct
  REGION 1..14: note = Description of sequence: epitope presenting peptide
SLLLCRMNSRNYIA

SEQ ID NO: 1522 - protein, 9 aa, synthetic construct
  REGION 1..9: note = Description of sequence: epitope presenting peptide
LLMPILTLT

SEQ ID NO: 1523 - protein, 13 aa, synthetic construct
  REGION 1..13: note = Description of sequence: epitope presenting peptide
NYIAQVDVVNFNL

SEQ ID NO: 1524 - protein, 9 aa, synthetic construct
  REGION 1..9: note = Description of sequence: epitope presenting peptide
ILHCANFNV

SEQ ID NO: 1525 - protein, 9 aa, synthetic construct
  REGION 1..9: note = Description of sequence: epitope presenting peptide
YINVFAFPF

SEQ ID NO: 1526 - protein, 9 aa, synthetic construct
  REGION 1..9: note = Description of sequence: epitope presenting peptide
FPPTSFGPL

SEQ ID NO: 1527 - protein, 9 aa, synthetic construct
  REGION 1..9: note = Description of sequence: epitope presenting peptide
ISDYDYYRY

SEQ ID NO: 1528 - protein, 10 aa, synthetic construct
  REGION 1..10: note = Description of sequence: epitope presenting peptide
MDLFMRIFTI

SEQ ID NO: 1529 - protein, 9 aa, synthetic construct
  REGION 1..9: note = Description of sequence: epitope presenting peptide
NMLRIMASL

SEQ ID NO: 1530 - protein, 10 aa, synthetic construct
  REGION 1..10: note = Description of sequence: epitope presenting peptide
FVRATATIPI

SEQ ID NO: 1531 - protein, 10 aa, synthetic construct
  REGION 1..10: note = Description of sequence: epitope presenting peptide
MVMCGGSLYV

SEQ ID NO: 1532 - protein, 10 aa, synthetic construct
  REGION 1..10: note = Description of sequence: epitope presenting peptide
IVGVALLAVF

SEQ ID NO: 1533 - protein, 11 aa, synthetic construct
  REGION 1..11: note = Description of sequence: epitope presenting peptide
ITLKKRWQLAL

SEQ ID NO: 1534 - protein, 9 aa, synthetic construct
  REGION 1..9: note = Description of sequence: epitope presenting peptide
RILGAGCFV

SEQ ID NO: 1535 - protein, 13 aa, synthetic construct
  REGION 1..13: note = Description of sequence: epitope presenting peptide
NPLLYDANYFLCW

SEQ ID NO: 1536 - protein, 10 aa, synthetic construct
  REGION 1..10: note = Description of sequence: epitope presenting peptide
HVDTDLTKPY

SEQ ID NO: 1537 - protein, 10 aa, synthetic construct
  REGION 1..10: note = Description of sequence: epitope presenting peptide
IPYNSVTSSI

SEQ ID NO: 1538 - protein, 9 aa, synthetic construct
  REGION 1..9: note = Description of sequence: epitope presenting peptide
AAISDYDYY

SEQ ID NO: 1539 - protein, 10 aa, synthetic construct
  REGION 1..10: note = Description of sequence: epitope presenting peptide
TTSPISEHDY

SEQ ID NO: 1540 - protein, 9 aa, synthetic construct
  REGION 1..9: note = Description of sequence: epitope presenting peptide
TITQMNLKY

SEQ ID NO: 1541 - protein, 10 aa, synthetic construct
  REGION 1..10: note = Description of sequence: epitope presenting peptide
TSSGDATTAY

SEQ ID NO: 1542 - protein, 14 aa, synthetic construct
  REGION 1..14: note = Description of sequence: epitope presenting peptide
VLHSYFTSDYYQLY

SEQ ID NO: 1543 - protein, 9 aa, synthetic construct
  REGION 1..9: note = Description of sequence: epitope presenting peptide
DTDFVNEFY

SEQ ID NO: 1544 - protein, 11 aa, synthetic construct
  REGION 1..11: note = Description of sequence: epitope presenting peptide
NTSRYWEPEFY

SEQ ID NO: 1545 - protein, 9 aa, synthetic construct
  REGION 1..9: note = Description of sequence: epitope presenting peptide
FTSDYYQLY

SEQ ID NO: 1546 - protein, 9 aa, synthetic construct
  REGION 1..9: note = Description of sequence: epitope presenting peptide
TMADLVYAL

SEQ ID NO: 1547 - protein, 9 aa, synthetic construct
  REGION 1..9: note = Description of sequence: epitope presenting peptide
ALLAVFQSA

SEQ ID NO: 1548 - protein, 9 aa, synthetic construct
  REGION 1..9: note = Description of sequence: epitope presenting peptide
FVDGVPFVV

SEQ ID NO: 1549 - protein, 9 aa, synthetic construct
  REGION 1..9: note = Description of sequence: epitope presenting peptide
NLLLLFVTV

SEQ ID NO: 1550 - protein, 9 aa, synthetic construct
  REGION 1..9: note = Description of sequence: epitope presenting peptide
RQLLFVVEV

SEQ ID NO: 1551 - protein, 9 aa, synthetic construct
  REGION 1..9: note = Description of sequence: epitope presenting peptide
FVTVYSHLL

SEQ ID NO: 1552 - protein, 9 aa, synthetic construct
  REGION 1..9: note = Description of sequence: epitope presenting peptide
FVNEFYAYL

SEQ ID NO: 1553 - protein, 9 aa, synthetic construct
  REGION 1..9: note = Description of sequence: epitope presenting peptide
GLEAPFLYL

SEQ ID NO: 1554 - protein, 9 aa, synthetic construct
  REGION 1..9: note = Description of sequence: epitope presenting peptide
KQGDDYVYL

SEQ ID NO: 1555 - protein, 11 aa, synthetic construct
  REGION 1..11: note = Description of sequence: epitope presenting peptide
NPLLYDANYFL

SEQ ID NO: 1556 - protein, 10 aa, synthetic construct
  REGION 1..10: note = Description of sequence: epitope presenting peptide
FVENPDILRV

SEQ ID NO: 1557 - protein, 11 aa, synthetic construct
  REGION 1..11: note = Description of sequence: epitope presenting peptide
SYFTSDYYQLY

SEQ ID NO: 1558 - protein, 9 aa, synthetic construct
  REGION 1..9: note = Description of sequence: epitope presenting peptide
VVSTGYHFR

SEQ ID NO: 1559 - protein, 10 aa, synthetic construct
  REGION 1..10: note = Description of sequence: epitope presenting peptide
DYYQLYSTQL

SEQ ID NO: 1560 - protein, 10 aa, synthetic construct
  REGION 1..10: note = Description of sequence: epitope presenting peptide
QTVKPGNFNK

SEQ ID NO: 1561 - protein, 9 aa, synthetic construct
  REGION 1..9: note = Description of sequence: epitope presenting peptide
FAVSKGFFK

SEQ ID NO: 1562 - protein, 9 aa, synthetic construct
  REGION 1..9: note = Description of sequence: epitope presenting peptide
AGLEAPFLY

SEQ ID NO: 1563 - protein, 9 aa, synthetic construct
  REGION 1..9: note = Description of sequence: epitope presenting peptide
AISDYDYYR

SEQ ID NO: 1564 - protein, 9 aa, synthetic construct
  REGION 1..9: note = Description of sequence: epitope presenting peptide
LEAPFLYLY

SEQ ID NO: 1565 - protein, 9 aa, synthetic construct
  REGION 1..9: note = Description of sequence: epitope presenting peptide
HSYFTSDYY

SEQ ID NO: 1566 - protein, 11 aa, synthetic construct
  REGION 1..11: note = Description of sequence: epitope presenting peptide
FDIYNDKVAGF

SEQ ID NO: 1567 - protein, 9 aa, synthetic construct
  REGION 1..9: note = Description of sequence: epitope presenting peptide
FTIGTVTLK

SEQ ID NO: 1568 - protein, 10 aa, synthetic construct
  REGION 1..10: note = Description of sequence: epitope presenting peptide
RYFKYWDQTY

SEQ ID NO: 1569 - protein, 9 aa, synthetic construct
  REGION 1..9: note = Description of sequence: epitope presenting peptide
HVTFFIYNK

SEQ ID NO: 1570 - protein, 9 aa, synthetic construct
  REGION 1..9: note = Description of sequence: epitope presenting peptide
SFGPLVRKI

SEQ ID NO: 1571 - protein, 9 aa, synthetic construct
  REGION 1..9: note = Description of sequence: epitope presenting peptide
FYAYLRKHF

SEQ ID NO: 1572 - protein, 9 aa, synthetic construct
  REGION 1..9: note = Description of sequence: epitope presenting peptide
QSASKIITL

SEQ ID NO: 1573 - protein, 9 aa, synthetic construct
  REGION 1..9: note = Description of sequence: epitope presenting peptide
LYYQNNVFM

SEQ ID NO: 1574 - protein, 9 aa, synthetic construct
  REGION 1..9: note = Description of sequence: epitope presenting peptide
TLKKRWQLA

SEQ ID NO: 1575 - protein, 9 aa, synthetic construct
  REGION 1..9: note = Description of sequence: epitope presenting peptide
YFVVKRHTF

SEQ ID NO: 1576 - protein, 9 aa, synthetic construct
  REGION 1..9: note = Description of sequence: epitope presenting peptide
VAAGLEAPF

SEQ ID NO: 1577 - protein, 9 aa, synthetic construct
  REGION 1..9: note = Description of sequence: epitope presenting peptide
TLKEILVTY

SEQ ID NO: 1578 - protein, 10 aa, synthetic construct
  REGION 1..10: note = Description of sequence: epitope presenting peptide
QEYADVFHLY

SEQ ID NO: 1579 - protein, 12 aa, synthetic construct
  REGION 1..12: note = Description of sequence: epitope presenting peptide
AAGLEAPFLYLY

SEQ ID NO: 1580 - protein, 9 aa, synthetic construct
  REGION 1..9: note = Description of sequence: epitope presenting peptide
KVAGFAKFL

SEQ ID NO: 1581 - protein, 8 aa, synthetic construct
  REGION 1..8: note = Description of sequence: epitope presenting peptide
LPFGWLIV

SEQ ID NO: 1582 - protein, 9 aa, synthetic construct
  REGION 1..9: note = Description of sequence: epitope presenting peptide
AMYTPHTVL

SEQ ID NO: 1583 - protein, 12 aa, synthetic construct
  REGION 1..12: note = Description of sequence: epitope presenting peptide
IPYNSVTSSIVI

SEQ ID NO: 1584 - protein, 13 aa, synthetic construct
  REGION 1..13: note = Description of sequence: epitope presenting peptide
DFYDFAVSKGFFK

SEQ ID NO: 1585 - protein, 9 aa, synthetic construct
  REGION 1..9: note = Description of sequence: epitope presenting peptide
SICSTMTNR

SEQ ID NO: 1586 - protein, 9 aa, synthetic construct
  REGION 1..9: note = Description of sequence: epitope presenting peptide
ATIPIQASL

SEQ ID NO: 1587 - protein, 9 aa, synthetic construct
  REGION 1..9: note = Description of sequence: epitope presenting peptide
IMASLVLAR

SEQ ID NO: 1588 - protein, 12 aa, synthetic construct
  REGION 1..12: note = Description of sequence: epitope presenting peptide
SASKIITLKKRW

SEQ ID NO: 1589 - protein, 10 aa, synthetic construct
  REGION 1..10: note = Description of sequence: epitope presenting peptide
FVNEFYAYLR

SEQ ID NO: 1590 - protein, 9 aa, synthetic construct
  REGION 1..9: note = Description of sequence: epitope presenting peptide
FVRIIMRLW

SEQ ID NO: 1591 - protein, 10 aa, synthetic construct
  REGION 1..10: note = Description of sequence: epitope presenting peptide
FVVSTGYHFR

SEQ ID NO: 1592 - protein, 9 aa, synthetic construct
  REGION 1..9: note = Description of sequence: epitope presenting peptide
CRSKNPLLY

SEQ ID NO: 1593 - protein, 10 aa, synthetic construct
  REGION 1..10: note = Description of sequence: epitope presenting peptide
AAISDYDYYR

SEQ ID NO: 1594 - protein, 9 aa, synthetic construct
  REGION 1..9: note = Description of sequence: epitope presenting peptide
FLYLYALVY

SEQ ID NO: 1595 - protein, 10 aa, synthetic construct
  REGION 1..10: note = Description of sequence: epitope presenting peptide
YAISAKNRAR

SEQ ID NO: 1596 - protein, 9 aa, synthetic construct
  REGION 1..9: note = Description of sequence: epitope presenting peptide
VRIIMRLWL

SEQ ID NO: 1597 - protein, 9 aa, synthetic construct
  REGION 1..9: note = Description of sequence: epitope presenting peptide
MASLVLARK

SEQ ID NO: 1598 - protein, 9 aa, synthetic construct
  REGION 1..9: note = Description of sequence: epitope presenting peptide
VPHISRQRL

SEQ ID NO: 1599 - protein, 9 aa, synthetic construct
  REGION 1..9: note = Description of sequence: epitope presenting peptide
IYDEPTTTT

SEQ ID NO: 1600 - protein, 9 aa, synthetic construct
  REGION 1..9: note = Description of sequence: epitope presenting peptide
VTIAEILLI

SEQ ID NO: 1601 - protein, 9 aa, synthetic construct
  REGION 1..9: note = Description of sequence: epitope presenting peptide
LDYIINLII

SEQ ID NO: 1602 - protein, 11 aa, synthetic construct
  REGION 1..11: note = Description of sequence: epitope presenting peptide
MPNMLRIMASL

SEQ ID NO: 1603 - protein, 14 aa, synthetic construct
  REGION 1..14: note = Description of sequence: epitope presenting peptide
IIKNLSKSLTENKY

SEQ ID NO: 1604 - protein, 10 aa, synthetic construct
  REGION 1..10: note = Description of sequence: epitope presenting peptide
LPYPDPSRIL

SEQ ID NO: 1605 - protein, 12 aa, synthetic construct
  REGION 1..12: note = Description of sequence: epitope presenting peptide
RTFKVSIWNLDY

SEQ ID NO: 1606 - protein, 9 aa, synthetic construct
  REGION 1..9: note = Description of sequence: epitope presenting peptide
NLHSSRLSF

SEQ ID NO: 1607 - protein, 10 aa, synthetic construct
  REGION 1..10: note = Description of sequence: epitope presenting peptide
HLVDFQVTIA

SEQ ID NO: 1608 - protein, 8 aa, synthetic construct
  REGION 1..8: note = Description of sequence: epitope presenting peptide
MLRIMASL

SEQ ID NO: 1609 - protein, 11 aa, synthetic construct
  REGION 1..11: note = Description of sequence: epitope presenting peptide
SIWNLDYIINL

SEQ ID NO: 1610 - protein, 9 aa, synthetic construct
  REGION 1..9: note = Description of sequence: epitope presenting peptide
VVYRAFDIY

SEQ ID NO: 1611 - protein, 9 aa, synthetic construct
  REGION 1..9: note = Description of sequence: epitope presenting peptide
LIIMRTFKV

SEQ ID NO: 1612 - protein, 9 aa, synthetic construct
  REGION 1..9: note = Description of sequence: epitope presenting peptide
TFKVSIWNL

SEQ ID NO: 1613 - protein, 10 aa, synthetic construct
  REGION 1..10: note = Description of sequence: epitope presenting peptide
LVKQGDDYVY

SEQ ID NO: 1614 - protein, 9 aa, synthetic construct
  REGION 1..9: note = Description of sequence: epitope presenting peptide
WEPEFYEAM

SEQ ID NO: 1615 - protein, 12 aa, synthetic construct
  REGION 1..12: note = Description of sequence: epitope presenting peptide
RARSVSPKLFIR

SEQ ID NO: 1616 - protein, 10 aa, synthetic construct
  REGION 1..10: note = Description of sequence: epitope presenting peptide
VENPDILRVY

SEQ ID NO: 1617 - protein, 13 aa, synthetic construct
  REGION 1..13: note = Description of sequence: epitope presenting peptide
AESHVDTDLTKPY

SEQ ID NO: 1618 - protein, 12 aa, synthetic construct
  REGION 1..12: note = Description of sequence: epitope presenting peptide
VQELYSPIFLIV

SEQ ID NO: 1619 - protein, 12 aa, synthetic construct
  REGION 1..12: note = Description of sequence: epitope presenting peptide
YSDVENPHLMGW

SEQ ID NO: 1620 - protein, 10 aa, synthetic construct
  REGION 1..10: note = Description of sequence: epitope presenting peptide
VFITLCFTLK

SEQ ID NO: 1621 - protein, 10 aa, synthetic construct
  REGION 1..10: note = Description of sequence: epitope presenting peptide
VENPHLMGWD

SEQ ID NO: 1622 - protein, 11 aa, synthetic construct
  REGION 1..11: note = Description of sequence: epitope presenting peptide
FACPDGVKHVY

SEQ ID NO: 1623 - protein, 12 aa, synthetic construct
  REGION 1..12: note = Description of sequence: epitope presenting peptide
TETDLTKGPHEF

SEQ ID NO: 1624 - protein, 11 aa, synthetic construct
  REGION 1..11: note = Description of sequence: epitope presenting peptide
FIRQEEVQELY

SEQ ID NO: 1625 - protein, 9 aa, synthetic construct
  REGION 1..9: note = Description of sequence: epitope presenting peptide
VENPDILRV

SEQ ID NO: 1626 - protein, 10 aa, synthetic construct
  REGION 1..10: note = Description of sequence: epitope presenting peptide
QLRARSVSPK

SEQ ID NO: 1627 - protein, 9 aa, synthetic construct
  REGION 1..9: note = Description of sequence: epitope presenting peptide
DAMRNAGIV

SEQ ID NO: 1628 - protein, 11 aa, synthetic construct
  REGION 1..11: note = Description of sequence: epitope presenting peptide
KFALTCFSTQF

SEQ ID NO: 1629 - protein, 9 aa, synthetic construct
  REGION 1..9: note = Description of sequence: epitope presenting peptide
SPIFLIVAA

SEQ ID NO: 1630 - protein, 13 aa, synthetic construct
  REGION 1..13: note = Description of sequence: epitope presenting peptide
DYVYLPYPDPSRI

SEQ ID NO: 1631 - protein, 9 aa, synthetic construct
  REGION 1..9: note = Description of sequence: epitope presenting peptide
EGNSPFHPL

SEQ ID NO: 1632 - protein, 11 aa, synthetic construct
  REGION 1..11: note = Description of sequence: epitope presenting peptide
VYLPYPDPSRI

SEQ ID NO: 1633 - protein, 10 aa, synthetic construct
  REGION 1..10: note = Description of sequence: epitope presenting peptide
HPLADNKFAL

SEQ ID NO: 1634 - protein, 10 aa, synthetic construct
  REGION 1..10: note = Description of sequence: epitope presenting peptide
YLPYPDPSRI

SEQ ID NO: 1635 - protein, 11 aa, synthetic construct
  REGION 1..11: note = Description of sequence: epitope presenting peptide
LLKEPCSSGTY

SEQ ID NO: 1636 - protein, 9 aa, synthetic construct
  REGION 1..9: note = Description of sequence: epitope presenting peptide
STVFPPTSF

SEQ ID NO: 1637 - protein, 10 aa, synthetic construct
  REGION 1..10: note = Description of sequence: epitope presenting peptide
IMLIIFWFSL

SEQ ID NO: 1638 - protein, 10 aa, synthetic construct
  REGION 1..10: note = Description of sequence: epitope presenting peptide
KSAGFPFNKW

SEQ ID NO: 1639 - protein, 12 aa, synthetic construct
  REGION 1..12: note = Description of sequence: epitope presenting peptide
YVVDDPCPIHFY

SEQ ID NO: 1640 - protein, 10 aa, synthetic construct
  REGION 1..10: note = Description of sequence: epitope presenting peptide
LTNDNTSRYW

SEQ ID NO: 1641 - protein, 10 aa, synthetic construct
  REGION 1..10: note = Description of sequence: epitope presenting peptide
RVGARKSAPL

SEQ ID NO: 1642 - protein, 9 aa, synthetic construct
  REGION 1..9: note = Description of sequence: epitope presenting peptide
VRQALLKTV

SEQ ID NO: 1643 - protein, 9 aa, synthetic construct
  REGION 1..9: note = Description of sequence: epitope presenting peptide
IQYIDIGNY

SEQ ID NO: 1644 - protein, 8 aa, synthetic construct
  REGION 1..8: note = Description of sequence: epitope presenting peptide
YRYNLPTM

SEQ ID NO: 1645 - protein, 9 aa, synthetic construct
  REGION 1..9: note = Description of sequence: epitope presenting peptide
YRYNLPTMC

SEQ ID NO: 1646 - protein, 12 aa, synthetic construct
  REGION 1..12: note = Description of sequence: epitope presenting peptide
GNYTVSCLPFTI

SEQ ID NO: 1647 - protein, 9 aa, synthetic construct
  REGION 1..9: note = Description of sequence: epitope presenting peptide
LRKHFSMMI

SEQ ID NO: 1648 - protein, 9 aa, synthetic construct
  REGION 1..9: note = Description of sequence: epitope presenting peptide
QSCTQHQPY

SEQ ID NO: 1649 - protein, 9 aa, synthetic construct
  REGION 1..9: note = Description of sequence: epitope presenting peptide
NVIPTITQM

SEQ ID NO: 1650 - protein, 10 aa, synthetic construct
  REGION 1..10: note = Description of sequence: epitope presenting peptide
VDDPCPIHFY

SEQ ID NO: 1651 - protein, 9 aa, synthetic construct
  REGION 1..9: note = Description of sequence: epitope presenting peptide
VRNLQHRLY

SEQ ID NO: 1652 - protein, 8 aa, synthetic construct
  REGION 1..8: note = Description of sequence: epitope presenting peptide
FLGIITTV

SEQ ID NO: 1653 - protein, 8 aa, synthetic construct
  REGION 1..8: note = Description of sequence: epitope presenting peptide
SRYWEPEF

SEQ ID NO: 1654 - protein, 9 aa, synthetic construct
  REGION 1..9: note = Description of sequence: epitope presenting peptide
KLGSLVVRC

SEQ ID NO: 1655 - protein, 9 aa, synthetic construct
  REGION 1..9: note = Description of sequence: epitope presenting peptide
EYHDVRVVL

SEQ ID NO: 1656 - protein, 10 aa, synthetic construct
  REGION 1..10: note = Description of sequence: epitope presenting peptide
ARLYYDSMSY

SEQ ID NO: 1657 - protein, 11 aa, synthetic construct
  REGION 1..11: note = Description of sequence: epitope presenting peptide
EYHDVRVVLDF

SEQ ID NO: 1658 - protein, 9 aa, synthetic construct
  REGION 1..9: note = Description of sequence: epitope presenting peptide
LRIMASLVL

SEQ ID NO: 1659 - protein, 9 aa, synthetic construct
  REGION 1..9: note = Description of sequence: epitope presenting peptide
EPKLGSLVV

SEQ ID NO: 1660 - protein, 9 aa, synthetic construct
  REGION 1..9: note = Description of sequence: epitope presenting peptide
YADVFHLYL

SEQ ID NO: 1661 - protein, 10 aa, synthetic construct
  REGION 1..10: note = Description of sequence: epitope presenting peptide
LEYHDVRVVL

SEQ ID NO: 1662 - protein, 9 aa, synthetic construct
  REGION 1..9: note = Description of sequence: epitope presenting peptide
LYLQYIRKL

SEQ ID NO: 1663 - protein, 9 aa, synthetic construct
  REGION 1..9: note = Description of sequence: epitope presenting peptide
VLQAVGACV

SEQ ID NO: 1664 - protein, 14 aa, synthetic construct
  REGION 1..14: note = Description of sequence: epitope presenting peptide
VYYPDKVFRSSVLH

SEQ ID NO: 1665 - protein, 9 aa, synthetic construct
  REGION 1..9: note = Description of sequence: epitope presenting peptide
LVLSVNPYV

SEQ ID NO: 1666 - protein, 14 aa, synthetic construct
  REGION 1..14: note = Description of sequence: epitope presenting peptide
FLPFFSNVTWFHAI

SEQ ID NO: 1667 - protein, 9 aa, synthetic construct
  REGION 1..9: note = Description of sequence: epitope presenting peptide
VVYRGTTTY

SEQ ID NO: 1668 - protein, 10 aa, synthetic construct
  REGION 1..10: note = Description of sequence: epitope presenting peptide
WIFGTTLDSK

SEQ ID NO: 1669 - protein, 11 aa, synthetic construct
  REGION 1..11: note = Description of sequence: epitope presenting peptide
KSWMESEFRVY

SEQ ID NO: 1670 - protein, 12 aa, synthetic construct
  REGION 1..12: note = Description of sequence: epitope presenting peptide
VYSSANNCTFEY

SEQ ID NO: 1671 - protein, 9 aa, synthetic construct
  REGION 1..9: note = Description of sequence: epitope presenting peptide
YQKVGMQKY

SEQ ID NO: 1672 - protein, 12 aa, synthetic construct
  REGION 1..12: note = Description of sequence: epitope presenting peptide
CTFEYVSQPFLM

SEQ ID NO: 1673 - protein, 9 aa, synthetic construct
  REGION 1..9: note = Description of sequence: epitope presenting peptide
YVFCTVNAL

SEQ ID NO: 1674 - protein, 10 aa, synthetic construct
  REGION 1..10: note = Description of sequence: epitope presenting peptide
IYSKHTPINL

SEQ ID NO: 1675 - protein, 9 aa, synthetic construct
  REGION 1..9: note = Description of sequence: epitope presenting peptide
IVDTVSALV

SEQ ID NO: 1676 - protein, 9 aa, synthetic construct
  REGION 1..9: note = Description of sequence: epitope presenting peptide
LEPLVDLPI

SEQ ID NO: 1677 - protein, 9 aa, synthetic construct
  REGION 1..9: note = Description of sequence: epitope presenting peptide
YFTSDYYQL

SEQ ID NO: 1678 - protein, 14 aa, synthetic construct
  REGION 1..14: note = Description of sequence: epitope presenting peptide
DLPIGINITRFQTL

SEQ ID NO: 1679 - protein, 9 aa, synthetic construct
  REGION 1..9: note = Description of sequence: epitope presenting peptide
KLNVGDYFV

SEQ ID NO: 1680 - protein, 11 aa, synthetic construct
  REGION 1..11: note = Description of sequence: epitope presenting peptide
APTLVPQEHYV

SEQ ID NO: 1681 - protein, 12 aa, synthetic construct
  REGION 1..12: note = Description of sequence: epitope presenting peptide
WTAGAAAYYVGY

SEQ ID NO: 1682 - protein, 9 aa, synthetic construct
  REGION 1..9: note = Description of sequence: epitope presenting peptide
AVASKILGL

SEQ ID NO: 1683 - protein, 13 aa, synthetic construct
  REGION 1..13: note = Description of sequence: epitope presenting peptide
YYVGYLQPRTFLL

SEQ ID NO: 1684 - protein, 9 aa, synthetic construct
  REGION 1..9: note = Description of sequence: epitope presenting peptide
ILGLPTQTV

SEQ ID NO: 1685 - protein, 10 aa, synthetic construct
  REGION 1..10: note = Description of sequence: epitope presenting peptide
CALDPLSETK

SEQ ID NO: 1686 - protein, 14 aa, synthetic construct
  REGION 1..14: note = Description of sequence: epitope presenting peptide
SETKCTLKSFTVEK

SEQ ID NO: 1687 - protein, 14 aa, synthetic construct
  REGION 1..14: note = Description of sequence: epitope presenting peptide
FGEVFNATRFASVY

SEQ ID NO: 1688 - protein, 9 aa, synthetic construct
  REGION 1..9: note = Description of sequence: epitope presenting peptide
RISNCVADY

SEQ ID NO: 1689 - protein, 10 aa, synthetic construct
  REGION 1..10: note = Description of sequence: epitope presenting peptide
VYRGTTTYKL

SEQ ID NO: 1690 - protein, 14 aa, synthetic construct
  REGION 1..14: note = Description of sequence: epitope presenting peptide
YSVLYNSASFSTFK

SEQ ID NO: 1691 - protein, 9 aa, synthetic construct
  REGION 1..9: note = Description of sequence: epitope presenting peptide
YYPSARIVY

SEQ ID NO: 1692 - protein, 10 aa, synthetic construct
  REGION 1..10: note = Description of sequence: epitope presenting peptide
NLDSKVGGNY

SEQ ID NO: 1693 - protein, 11 aa, synthetic construct
  REGION 1..11: note = Description of sequence: epitope presenting peptide
NYNYLYRLFRK

SEQ ID NO: 1694 - protein, 8 aa, synthetic construct
  REGION 1..8: note = Description of sequence: epitope presenting peptide
KPPISFPL

SEQ ID NO: 1695 - protein, 12 aa, synthetic construct
  REGION 1..12: note = Description of sequence: epitope presenting peptide
KPFERDISTEIY

SEQ ID NO: 1696 - protein, 9 aa, synthetic construct
  REGION 1..9: note = Description of sequence: epitope presenting peptide
IPARARVEC

SEQ ID NO: 1697 - protein, 9 aa, synthetic construct
  REGION 1..9: note = Description of sequence: epitope presenting peptide
NGVEGFNCY

SEQ ID NO: 1698 - protein, 9 aa, synthetic construct
  REGION 1..9: note = Description of sequence: epitope presenting peptide
FQPTNGVGY

SEQ ID NO: 1699 - protein, 11 aa, synthetic construct
  REGION 1..11: note = Description of sequence: epitope presenting peptide
LEIPRRNVATL

SEQ ID NO: 1700 - protein, 12 aa, synthetic construct
  REGION 1..12: note = Description of sequence: epitope presenting peptide
GYQPYRVVVLSF

SEQ ID NO: 1701 - protein, 9 aa, synthetic construct
  REGION 1..9: note = Description of sequence: epitope presenting peptide
VPQEHYVRI

SEQ ID NO: 1702 - protein, 12 aa, synthetic construct
  REGION 1..12: note = Description of sequence: epitope presenting peptide
VYSTGSNVFQTR

SEQ ID NO: 1703 - protein, 10 aa, synthetic construct
  REGION 1..10: note = Description of sequence: epitope presenting peptide
QLYLGGMSYY

SEQ ID NO: 1704 - protein, 10 aa, synthetic construct
  REGION 1..10: note = Description of sequence: epitope presenting peptide
IGAEHVNNSY

SEQ ID NO: 1705 - protein, 9 aa, synthetic construct
  REGION 1..9: note = Description of sequence: epitope presenting peptide
YRGTTTYKL

SEQ ID NO: 1706 - protein, 12 aa, synthetic construct
  REGION 1..12: note = Description of sequence: epitope presenting peptide
LGAENSVAYSNN

SEQ ID NO: 1707 - protein, 10 aa, synthetic construct
  REGION 1..10: note = Description of sequence: epitope presenting peptide
FTISVTTEIL

SEQ ID NO: 1708 - protein, 9 aa, synthetic construct
  REGION 1..9: note = Description of sequence: epitope presenting peptide
LQLGFSTGV

SEQ ID NO: 1709 - protein, 10 aa, synthetic construct
  REGION 1..10: note = Description of sequence: epitope presenting peptide
KTSVDCTMYI

SEQ ID NO: 1710 - protein, 9 aa, synthetic construct
  REGION 1..9: note = Description of sequence: epitope presenting peptide
AIMTRCLAV

SEQ ID NO: 1711 - protein, 9 aa, synthetic construct
  REGION 1..9: note = Description of sequence: epitope presenting peptide
LLQYGSFCT

SEQ ID NO: 1712 - protein, 10 aa, synthetic construct
  REGION 1..10: note = Description of sequence: epitope presenting peptide
YKIEELFYSY

SEQ ID NO: 1713 - protein, 9 aa, synthetic construct
  REGION 1..9: note = Description of sequence: epitope presenting peptide
GSFCTQLNR

SEQ ID NO: 1714 - protein, 9 aa, synthetic construct
  REGION 1..9: note = Description of sequence: epitope presenting peptide
FTDGVCLFW

SEQ ID NO: 1715 - protein, 10 aa, synthetic construct
  REGION 1..10: note = Description of sequence: epitope presenting peptide
TQLNRALTGI

SEQ ID NO: 1716 - protein, 10 aa, synthetic construct
  REGION 1..10: note = Description of sequence: epitope presenting peptide
KNLSDRVVFV

SEQ ID NO: 1717 - protein, 12 aa, synthetic construct
  REGION 1..12: note = Description of sequence: epitope presenting peptide
QEVFAQVKQIYK

SEQ ID NO: 1718 - protein, 9 aa, synthetic construct
  REGION 1..9: note = Description of sequence: epitope presenting peptide
ALLADKFPV

SEQ ID NO: 1719 - protein, 12 aa, synthetic construct
  REGION 1..12: note = Description of sequence: epitope presenting peptide
KQIYKTPPIKDF

SEQ ID NO: 1720 - protein, 10 aa, synthetic construct
  REGION 1..10: note = Description of sequence: epitope presenting peptide
ILPDPSKPSK

SEQ ID NO: 1721 - protein, 11 aa, synthetic construct
  REGION 1..11: note = Description of sequence: epitope presenting peptide
LQIPFAMQMAY

SEQ ID NO: 1722 - protein, 10 aa, synthetic construct
  REGION 1..10: note = Description of sequence: epitope presenting peptide
YNLWNTFTRL

SEQ ID NO: 1723 - protein, 10 aa, synthetic construct
  REGION 1..10: note = Description of sequence: epitope presenting peptide
TQNVLYENQK

SEQ ID NO: 1724 - protein, 9 aa, synthetic construct
  REGION 1..9: note = Description of sequence: epitope presenting peptide
NLWNTFTRL

SEQ ID NO: 1725 - protein, 9 aa, synthetic construct
  REGION 1..9: note = Description of sequence: epitope presenting peptide
NQKLIANQF

SEQ ID NO: 1726 - protein, 9 aa, synthetic construct
  REGION 1..9: note = Description of sequence: epitope presenting peptide
AGFSLWVYK

SEQ ID NO: 1727 - protein, 10 aa, synthetic construct
  REGION 1..10: note = Description of sequence: epitope presenting peptide
LSSTASALGK

SEQ ID NO: 1728 - protein, 9 aa, synthetic construct
  REGION 1..9: note = Description of sequence: epitope presenting peptide
TYACWHHSI

SEQ ID NO: 1729 - protein, 11 aa, synthetic construct
  REGION 1..11: note = Description of sequence: epitope presenting peptide
AQALNTLVKQL

SEQ ID NO: 1730 - protein, 9 aa, synthetic construct
  REGION 1..9: note = Description of sequence: epitope presenting peptide
PFMIDVQQW

SEQ ID NO: 1731 - protein, 10 aa, synthetic construct
  REGION 1..10: note = Description of sequence: epitope presenting peptide
SVLNDILSRL

SEQ ID NO: 1732 - protein, 14 aa, synthetic construct
  REGION 1..14: note = Description of sequence: epitope presenting peptide
VEAEVQIDRLITGR

SEQ ID NO: 1733 - protein, 13 aa, synthetic construct
  REGION 1..13: note = Description of sequence: epitope presenting peptide
LITGRLQSLQTYV

SEQ ID NO: 1734 - protein, 13 aa, synthetic construct
  REGION 1..13: note = Description of sequence: epitope presenting peptide
AEIRASANLAATK

SEQ ID NO: 1735 - protein, 9 aa, synthetic construct
  REGION 1..9: note = Description of sequence: epitope presenting peptide
KIEELFYSY

SEQ ID NO: 1736 - protein, 9 aa, synthetic construct
  REGION 1..9: note = Description of sequence: epitope presenting peptide
RVDFCGKGY

SEQ ID NO: 1737 - protein, 9 aa, synthetic construct
  REGION 1..9: note = Description of sequence: epitope presenting peptide
KQFDTYNLW

SEQ ID NO: 1738 - protein, 10 aa, synthetic construct
  REGION 1..10: note = Description of sequence: epitope presenting peptide
YHLMSFPQSA

SEQ ID NO: 1739 - protein, 13 aa, synthetic construct
  REGION 1..13: note = Description of sequence: epitope presenting peptide
APHGVVFLHVTYV

SEQ ID NO: 1740 - protein, 10 aa, synthetic construct
  REGION 1..10: note = Description of sequence: epitope presenting peptide
EEAIRHVRAW

SEQ ID NO: 1741 - protein, 12 aa, synthetic construct
  REGION 1..12: note = Description of sequence: epitope presenting peptide
HVTYVPAQEKNF

SEQ ID NO: 1742 - protein, 9 aa, synthetic construct
  REGION 1..9: note = Description of sequence: epitope presenting peptide
MYKGLPWNV

SEQ ID NO: 1743 - protein, 9 aa, synthetic construct
  REGION 1..9: note = Description of sequence: epitope presenting peptide
IITTDNTFV

SEQ ID NO: 1744 - protein, 10 aa, synthetic construct
  REGION 1..10: note = Description of sequence: epitope presenting peptide
DSFKEELDKY

SEQ ID NO: 1745 - protein, 9 aa, synthetic construct
  REGION 1..9: note = Description of sequence: epitope presenting peptide
TTLPVNVAF

SEQ ID NO: 1746 - protein, 10 aa, synthetic construct
  REGION 1..10: note = Description of sequence: epitope presenting peptide
CMTSCCSCLK

SEQ ID NO: 1747 - protein, 11 aa, synthetic construct
  REGION 1..11: note = Description of sequence: epitope presenting peptide
YTNSFTRGVYY

SEQ ID NO: 1748 - protein, 9 aa, synthetic construct
  REGION 1..9: note = Description of sequence: epitope presenting peptide
MLWCKDGHV

SEQ ID NO: 1749 - protein, 10 aa, synthetic construct
  REGION 1..10: note = Description of sequence: epitope presenting peptide
FIERYKLEGY

SEQ ID NO: 1750 - protein, 9 aa, synthetic construct
  REGION 1..9: note = Description of sequence: epitope presenting peptide
STQDLFLPF

SEQ ID NO: 1751 - protein, 11 aa, synthetic construct
  REGION 1..11: note = Description of sequence: epitope presenting peptide
FIPMDSTVKNY

SEQ ID NO: 1752 - protein, 9 aa, synthetic construct
  REGION 1..9: note = Description of sequence: epitope presenting peptide
CNDPFLGVY

SEQ ID NO: 1753 - protein, 9 aa, synthetic construct
  REGION 1..9: note = Description of sequence: epitope presenting peptide
KVDGVDVEL

SEQ ID NO: 1754 - protein, 9 aa, synthetic construct
  REGION 1..9: note = Description of sequence: epitope presenting peptide
KVDGVVQQL

SEQ ID NO: 1755 - protein, 10 aa, synthetic construct
  REGION 1..10: note = Description of sequence: epitope presenting peptide
SASFSTFKCY

SEQ ID NO: 1756 - protein, 9 aa, synthetic construct
  REGION 1..9: note = Description of sequence: epitope presenting peptide
SVVSKVVKV

SEQ ID NO: 1757 - protein, 10 aa, synthetic construct
  REGION 1..10: note = Description of sequence: epitope presenting peptide
KPRSQMEIDF

SEQ ID NO: 1758 - protein, 10 aa, synthetic construct
  REGION 1..10: note = Description of sequence: epitope presenting peptide
LLTDEMIAQY

SEQ ID NO: 1759 - protein, 9 aa, synthetic construct
  REGION 1..9: note = Description of sequence: epitope presenting peptide
TICAPLTVF

SEQ ID NO: 1760 - protein, 10 aa, synthetic construct
  REGION 1..10: note = Description of sequence: epitope presenting peptide
LTDEMIAQYT

SEQ ID NO: 1761 - protein, 9 aa, synthetic construct
  REGION 1..9: note = Description of sequence: epitope presenting peptide
VVQQLPETY

SEQ ID NO: 1762 - protein, 8 aa, synthetic construct
  REGION 1..8: note = Description of sequence: epitope presenting peptide
TDEMIAQY

SEQ ID NO: 1763 - protein, 9 aa, synthetic construct
  REGION 1..9: note = Description of sequence: epitope presenting peptide
GRVDGQVDL

SEQ ID NO: 1764 - protein, 11 aa, synthetic construct
  REGION 1..11: note = Description of sequence: epitope presenting peptide
ITGRLQSLQTY

SEQ ID NO: 1765 - protein, 9 aa, synthetic construct
  REGION 1..9: note = Description of sequence: epitope presenting peptide
GVAMPNLYK

SEQ ID NO: 1766 - protein, 11 aa, synthetic construct
  REGION 1..11: note = Description of sequence: epitope presenting peptide
SKRVDFCGKGY

SEQ ID NO: 1767 - protein, 10 aa, synthetic construct
  REGION 1..10: note = Description of sequence: epitope presenting peptide
LQELGKYEQY

SEQ ID NO: 1768 - protein, 11 aa, synthetic construct
  REGION 1..11: note = Description of sequence: epitope presenting peptide
SSEAFLIGCNY

SEQ ID NO: 1769 - protein, 10 aa, synthetic construct
  REGION 1..10: note = Description of sequence: epitope presenting peptide
SYSLFDMSKF

SEQ ID NO: 1770 - protein, 9 aa, synthetic construct
  REGION 1..9: note = Description of sequence: epitope presenting peptide
FVFLVLLPL

SEQ ID NO: 1771 - protein, 9 aa, synthetic construct
  REGION 1..9: note = Description of sequence: epitope presenting peptide
KLMGHFAWW

SEQ ID NO: 1772 - protein, 8 aa, synthetic construct
  REGION 1..8: note = Description of sequence: epitope presenting peptide
FLPFFSNV

SEQ ID NO: 1773 - protein, 9 aa, synthetic construct
  REGION 1..9: note = Description of sequence: epitope presenting peptide
YVMHANYIF

SEQ ID NO: 1774 - protein, 11 aa, synthetic construct
  REGION 1..11: note = Description of sequence: epitope presenting peptide
VLPFNDGVYFA

SEQ ID NO: 1775 - protein, 11 aa, synthetic construct
  REGION 1..11: note = Description of sequence: epitope presenting peptide
SYFIASFRLFA

SEQ ID NO: 1776 - protein, 10 aa, synthetic construct
  REGION 1..10: note = Description of sequence: epitope presenting peptide
KLNDLCFTNV

SEQ ID NO: 1777 - protein, 10 aa, synthetic construct
  REGION 1..10: note = Description of sequence: epitope presenting peptide
NPIQLSSYSL

SEQ ID NO: 1778 - protein, 9 aa, synthetic construct
  REGION 1..9: note = Description of sequence: epitope presenting peptide
FPLKLRGTA

SEQ ID NO: 1779 - protein, 10 aa, synthetic construct
  REGION 1..10: note = Description of sequence: epitope presenting peptide
FPLKLRGTAV

SEQ ID NO: 1780 - protein, 13 aa, synthetic construct
  REGION 1..13: note = Description of sequence: epitope presenting peptide
REQIDGYVMHANY

SEQ ID NO: 1781 - protein, 10 aa, synthetic construct
  REGION 1..10: note = Description of sequence: epitope presenting peptide
FELLHAPATV

SEQ ID NO: 1782 - protein, 9 aa, synthetic construct
  REGION 1..9: note = Description of sequence: epitope presenting peptide
VAMPNLYKM

SEQ ID NO: 1783 - protein, 9 aa, synthetic construct
  REGION 1..9: note = Description of sequence: epitope presenting peptide
ELLHAPATV

SEQ ID NO: 1784 - protein, 12 aa, synthetic construct
  REGION 1..12: note = Description of sequence: epitope presenting peptide
GVAPGTAVLRQW

SEQ ID NO: 1785 - protein, 10 aa, synthetic construct
  REGION 1..10: note = Description of sequence: epitope presenting peptide
CATVHTANKW

SEQ ID NO: 1786 - protein, 9 aa, synthetic construct
  REGION 1..9: note = Description of sequence: epitope presenting peptide
GLTVLPPLL

SEQ ID NO: 1787 - protein, 10 aa, synthetic construct
  REGION 1..10: note = Description of sequence: epitope presenting peptide
FWRNTNPIQL

SEQ ID NO: 1788 - protein, 9 aa, synthetic construct
  REGION 1..9: note = Description of sequence: epitope presenting peptide
WRNTNPIQL

SEQ ID NO: 1789 - protein, 9 aa, synthetic construct
  REGION 1..9: note = Description of sequence: epitope presenting peptide
LRGTAVMSL

SEQ ID NO: 1790 - protein, 11 aa, synthetic construct
  REGION 1..11: note = Description of sequence: epitope presenting peptide
RLDKVEAEVQI

SEQ ID NO: 1791 - protein, 11 aa, synthetic construct
  REGION 1..11: note = Description of sequence: epitope presenting peptide
AIILASFSAST

SEQ ID NO: 1792 - protein, 13 aa, synthetic construct
  REGION 1..13: note = Description of sequence: epitope presenting peptide
APKEIIFLEGETL

SEQ ID NO: 1793 - protein, 9 aa, synthetic construct
  REGION 1..9: note = Description of sequence: epitope presenting peptide
ILSPLYAFA

SEQ ID NO: 1794 - protein, 9 aa, synthetic construct
  REGION 1..9: note = Description of sequence: epitope presenting peptide
TVYEKLKPV

SEQ ID NO: 1795 - protein, 8 aa, synthetic construct
  REGION 1..8: note = Description of sequence: epitope presenting peptide
SLIDLQEL

SEQ ID NO: 1796 - protein, 9 aa, synthetic construct
  REGION 1..9: note = Description of sequence: epitope presenting peptide
KTIQPRVEK

SEQ ID NO: 1797 - protein, 9 aa, synthetic construct
  REGION 1..9: note = Description of sequence: epitope presenting peptide
TFNGECPNF

SEQ ID NO: 1798 - protein, 8 aa, synthetic construct
  REGION 1..8: note = Description of sequence: epitope presenting peptide
YEKLKPVL

SEQ ID NO: 1799 - protein, 9 aa, synthetic construct
  REGION 1..9: note = Description of sequence: epitope presenting peptide
YQDVNCTEV

SEQ ID NO: 1800 - protein, 10 aa, synthetic construct
  REGION 1..10: note = Description of sequence: epitope presenting peptide
ITILDGISQY

SEQ ID NO: 1801 - protein, 9 aa, synthetic construct
  REGION 1..9: note = Description of sequence: epitope presenting peptide
EIKESVQTF

SEQ ID NO: 1802 - protein, 9 aa, synthetic construct
  REGION 1..9: note = Description of sequence: epitope presenting peptide
ALDPLSETK

SEQ ID NO: 1803 - protein, 9 aa, synthetic construct
  REGION 1..9: note = Description of sequence: epitope presenting peptide
SVYAWNRKR

SEQ ID NO: 1804 - protein, 9 aa, synthetic construct
  REGION 1..9: note = Description of sequence: epitope presenting peptide
GFMGRIRSV

SEQ ID NO: 1805 - protein, 9 aa, synthetic construct
  REGION 1..9: note = Description of sequence: epitope presenting peptide
VRSIFSRTL

SEQ ID NO: 1806 - protein, 10 aa, synthetic construct
  REGION 1..10: note = Description of sequence: epitope presenting peptide
RASANLAATK

SEQ ID NO: 1807 - protein, 9 aa, synthetic construct
  REGION 1..9: note = Description of sequence: epitope presenting peptide
LLSAGIFGA

SEQ ID NO: 1808 - protein, 9 aa, synthetic construct
  REGION 1..9: note = Description of sequence: epitope presenting peptide
FLGRYMSAL

SEQ ID NO: 1809 - protein, 10 aa, synthetic construct
  REGION 1..10: note = Description of sequence: epitope presenting peptide
GVYYPDKVFR

SEQ ID NO: 1810 - protein, 9 aa, synthetic construct
  REGION 1..9: note = Description of sequence: epitope presenting peptide
EILPVSMTK

SEQ ID NO: 1811 - protein, 10 aa, synthetic construct
  REGION 1..10: note = Description of sequence: epitope presenting peptide
QYIKWPWYIW

SEQ ID NO: 1812 - protein, 10 aa, synthetic construct
  REGION 1..10: note = Description of sequence: epitope presenting peptide
QLMCQPILLL

SEQ ID NO: 1813 - protein, 8 aa, synthetic construct
  REGION 1..8: note = Description of sequence: epitope presenting peptide
VYYPDKVF

SEQ ID NO: 1814 - protein, 9 aa, synthetic construct
  REGION 1..9: note = Description of sequence: epitope presenting peptide
TQDLFLPFF

SEQ ID NO: 1815 - protein, 10 aa, synthetic construct
  REGION 1..10: note = Description of sequence: epitope presenting peptide
TIEVNSFSGY

SEQ ID NO: 1816 - protein, 9 aa, synthetic construct
  REGION 1..9: note = Description of sequence: epitope presenting peptide
PTDNYITTY

SEQ ID NO: 1817 - protein, 9 aa, synthetic construct
  REGION 1..9: note = Description of sequence: epitope presenting peptide
SWMESEFRV

SEQ ID NO: 1818 - protein, 8 aa, synthetic construct
  REGION 1..8: note = Description of sequence: epitope presenting peptide
TDNYITTY

SEQ ID NO: 1819 - protein, 11 aa, synthetic construct
  REGION 1..11: note = Description of sequence: epitope presenting peptide
TTYPGQGLNGY

SEQ ID NO: 1820 - protein, 11 aa, synthetic construct
  REGION 1..11: note = Description of sequence: epitope presenting peptide
TFEYVSQPFLM

SEQ ID NO: 1821 - protein, 11 aa, synthetic construct
  REGION 1..11: note = Description of sequence: epitope presenting peptide
HTQVVDMSMTY

SEQ ID NO: 1822 - protein, 9 aa, synthetic construct
  REGION 1..9: note = Description of sequence: epitope presenting peptide
VFKNIDGYF

SEQ ID NO: 1823 - protein, 10 aa, synthetic construct
  REGION 1..10: note = Description of sequence: epitope presenting peptide
VGYLQPRTFL

SEQ ID NO: 1824 - protein, 11 aa, synthetic construct
  REGION 1..11: note = Description of sequence: epitope presenting peptide
TTDPSFLGRYM

SEQ ID NO: 1825 - protein, 10 aa, synthetic construct
  REGION 1..10: note = Description of sequence: epitope presenting peptide
GYLQPRTFLL

SEQ ID NO: 1826 - protein, 10 aa, synthetic construct
  REGION 1..10: note = Description of sequence: epitope presenting peptide
LGDVRETMSY

SEQ ID NO: 1827 - protein, 9 aa, synthetic construct
  REGION 1..9: note = Description of sequence: epitope presenting peptide
IYQTSNFRV

SEQ ID NO: 1828 - protein, 11 aa, synthetic construct
  REGION 1..11: note = Description of sequence: epitope presenting peptide
FTCASEYTGNY

SEQ ID NO: 1829 - protein, 10 aa, synthetic construct
  REGION 1..10: note = Description of sequence: epitope presenting peptide
YTGNYQCGHY

SEQ ID NO: 1830 - protein, 10 aa, synthetic construct
  REGION 1..10: note = Description of sequence: epitope presenting peptide
GNYNYLYRLF

SEQ ID NO: 1831 - protein, 11 aa, synthetic construct
  REGION 1..11: note = Description of sequence: epitope presenting peptide
CTEIDPKLDNY

SEQ ID NO: 1832 - protein, 9 aa, synthetic construct
  REGION 1..9: note = Description of sequence: epitope presenting peptide
AYSNNSIAI

SEQ ID NO: 1833 - protein, 8 aa, synthetic construct
  REGION 1..8: note = Description of sequence: epitope presenting peptide
SFIEDLLF

SEQ ID NO: 1834 - protein, 11 aa, synthetic construct
  REGION 1..11: note = Description of sequence: epitope presenting peptide
VTVKNGSIHLY

SEQ ID NO: 1835 - protein, 12 aa, synthetic construct
  REGION 1..12: note = Description of sequence: epitope presenting peptide
SFPQSAPHGVVF

SEQ ID NO: 1836 - protein, 14 aa, synthetic construct
  REGION 1..14: note = Description of sequence: epitope presenting peptide
QSDIEVTGDSCNNY

SEQ ID NO: 1837 - protein, 11 aa, synthetic construct
  REGION 1..11: note = Description of sequence: epitope presenting peptide
TYVPAQEKNFT

SEQ ID NO: 1838 - protein, 10 aa, synthetic construct
  REGION 1..10: note = Description of sequence: epitope presenting peptide
DSCNNYMLTY

SEQ ID NO: 1839 - protein, 9 aa, synthetic construct
  REGION 1..9: note = Description of sequence: epitope presenting peptide
VFVSNGTHW

SEQ ID NO: 1840 - protein, 10 aa, synthetic construct
  REGION 1..10: note = Description of sequence: epitope presenting peptide
VFVSNGTHWF

SEQ ID NO: 1841 - protein, 10 aa, synthetic construct
  REGION 1..10: note = Description of sequence: epitope presenting peptide
YTTTIKPVTY

SEQ ID NO: 1842 - protein, 9 aa, synthetic construct
  REGION 1..9: note = Description of sequence: epitope presenting peptide
HWFVTQRNF

SEQ ID NO: 1843 - protein, 9 aa, synthetic construct
  REGION 1..9: note = Description of sequence: epitope presenting peptide
EIDPKLDNY

SEQ ID NO: 1844 - protein, 9 aa, synthetic construct
  REGION 1..9: note = Description of sequence: epitope presenting peptide
STNVTIATY

SEQ ID NO: 1845 - protein, 10 aa, synthetic construct
  REGION 1..10: note = Description of sequence: epitope presenting peptide
VSSPDAVTAY

SEQ ID NO: 1846 - protein, 10 aa, synthetic construct
  REGION 1..10: note = Description of sequence: epitope presenting peptide
RVYSTGSNVF

SEQ ID NO: 1847 - protein, 9 aa, synthetic construct
  REGION 1..9: note = Description of sequence: epitope presenting peptide
FGDDTVIEV

SEQ ID NO: 1848 - protein, 10 aa, synthetic construct
  REGION 1..10: note = Description of sequence: epitope presenting peptide
FELDERIDKV

SEQ ID NO: 1849 - protein, 9 aa, synthetic construct
  REGION 1..9: note = Description of sequence: epitope presenting peptide
ELDERIDKV

SEQ ID NO: 1850 - protein, 9 aa, synthetic construct
  REGION 1..9: note = Description of sequence: epitope presenting peptide
ETKCTLKSF

SEQ ID NO: 1851 - protein, 11 aa, synthetic construct
  REGION 1..11: note = Description of sequence: epitope presenting peptide
NLYDKLVSSFL

SEQ ID NO: 1852 - protein, 12 aa, synthetic construct
  REGION 1..12: note = Description of sequence: epitope presenting peptide
EVFNATRFASVY

SEQ ID NO: 1853 - protein, 10 aa, synthetic construct
  REGION 1..10: note = Description of sequence: epitope presenting peptide
KIAEIPKEEV

SEQ ID NO: 1854 - protein, 10 aa, synthetic construct
  REGION 1..10: note = Description of sequence: epitope presenting peptide
DSKVGGNYNY

SEQ ID NO: 1855 - protein, 10 aa, synthetic construct
  REGION 1..10: note = Description of sequence: epitope presenting peptide
FLTENLLLYI

SEQ ID NO: 1856 - protein, 9 aa, synthetic construct
  REGION 1..9: note = Description of sequence: epitope presenting peptide
KLMPVCVET

SEQ ID NO: 1857 - protein, 10 aa, synthetic construct
  REGION 1..10: note = Description of sequence: epitope presenting peptide
NTSNQVAVLY

SEQ ID NO: 1858 - protein, 9 aa, synthetic construct
  REGION 1..9: note = Description of sequence: epitope presenting peptide
SLINTLNDL

SEQ ID NO: 1859 - protein, 13 aa, synthetic construct
  REGION 1..13: note = Description of sequence: epitope presenting peptide
YTMSLGAENSVAY

SEQ ID NO: 1860 - protein, 9 aa, synthetic construct
  REGION 1..9: note = Description of sequence: epitope presenting peptide
RTIKVFTTV

SEQ ID NO: 1861 - protein, 9 aa, synthetic construct
  REGION 1..9: note = Description of sequence: epitope presenting peptide
FTISVTTEI

SEQ ID NO: 1862 - protein, 10 aa, synthetic construct
  REGION 1..10: note = Description of sequence: epitope presenting peptide
EVFAQVKQIY

SEQ ID NO: 1863 - protein, 11 aa, synthetic construct
  REGION 1..11: note = Description of sequence: epitope presenting peptide
KLLHKPIVWHV

SEQ ID NO: 1864 - protein, 9 aa, synthetic construct
  REGION 1..9: note = Description of sequence: epitope presenting peptide
WTFGAGAAL

SEQ ID NO: 1865 - protein, 9 aa, synthetic construct
  REGION 1..9: note = Description of sequence: epitope presenting peptide
SLIYSTAAL

SEQ ID NO: 1866 - protein, 11 aa, synthetic construct
  REGION 1..11: note = Description of sequence: epitope presenting peptide
SLDTYPSLETI

SEQ ID NO: 1867 - protein, 9 aa, synthetic construct
  REGION 1..9: note = Description of sequence: epitope presenting peptide
NSFTRGVYY

SEQ ID NO: 1868 - protein, 9 aa, synthetic construct
  REGION 1..9: note = Description of sequence: epitope presenting peptide
ILFTRFFYV

SEQ ID NO: 1869 - protein, 9 aa, synthetic construct
  REGION 1..9: note = Description of sequence: epitope presenting peptide
FVSNGTHWF

SEQ ID NO: 1870 - protein, 9 aa, synthetic construct
  REGION 1..9: note = Description of sequence: epitope presenting peptide
ASFDNFKFV

SEQ ID NO: 1871 - protein, 11 aa, synthetic construct
  REGION 1..11: note = Description of sequence: epitope presenting peptide
AIVSTIQRKYK

SEQ ID NO: 1872 - protein, 10 aa, synthetic construct
  REGION 1..10: note = Description of sequence: epitope presenting peptide
SWMESEFRVY

SEQ ID NO: 1873 - protein, 9 aa, synthetic construct
  REGION 1..9: note = Description of sequence: epitope presenting peptide
GAAAYYVGY

SEQ ID NO: 1874 - protein, 9 aa, synthetic construct
  REGION 1..9: note = Description of sequence: epitope presenting peptide
YMSALNHTK

SEQ ID NO: 1875 - protein, 10 aa, synthetic construct
  REGION 1..10: note = Description of sequence: epitope presenting peptide
KVGGNYNYLY

SEQ ID NO: 1876 - protein, 9 aa, synthetic construct
  REGION 1..9: note = Description of sequence: epitope presenting peptide
VMYMGTLSY

SEQ ID NO: 1877 - protein, 9 aa, synthetic construct
  REGION 1..9: note = Description of sequence: epitope presenting peptide
VGGNYNYLY

SEQ ID NO: 1878 - protein, 9 aa, synthetic construct
  REGION 1..9: note = Description of sequence: epitope presenting peptide
IQITISSFK

SEQ ID NO: 1879 - protein, 9 aa, synthetic construct
  REGION 1..9: note = Description of sequence: epitope presenting peptide
WFVTQRNFY

SEQ ID NO: 1880 - protein, 10 aa, synthetic construct
  REGION 1..10: note = Description of sequence: epitope presenting peptide
RMYIFFASFY

SEQ ID NO: 1881 - protein, 9 aa, synthetic construct
  REGION 1..9: note = Description of sequence: epitope presenting peptide
SFKEELDKY

SEQ ID NO: 1882 - protein, 9 aa, synthetic construct
  REGION 1..9: note = Description of sequence: epitope presenting peptide
QVVNVVTTK

SEQ ID NO: 1883 - protein, 9 aa, synthetic construct
  REGION 1..9: note = Description of sequence: epitope presenting peptide
VLKGVKLHY

SEQ ID NO: 1884 - protein, 9 aa, synthetic construct
  REGION 1..9: note = Description of sequence: epitope presenting peptide
SANNCTFEY

SEQ ID NO: 1885 - protein, 9 aa, synthetic construct
  REGION 1..9: note = Description of sequence: epitope presenting peptide
VFAQVKQIY

SEQ ID NO: 1886 - protein, 9 aa, synthetic construct
  REGION 1..9: note = Description of sequence: epitope presenting peptide
YIATNGPLK

SEQ ID NO: 1887 - protein, 9 aa, synthetic construct
  REGION 1..9: note = Description of sequence: epitope presenting peptide
RVYSTGSNV

SEQ ID NO: 1888 - protein, 9 aa, synthetic construct
  REGION 1..9: note = Description of sequence: epitope presenting peptide
STFNVPMEK

SEQ ID NO: 1889 - protein, 9 aa, synthetic construct
  REGION 1..9: note = Description of sequence: epitope presenting peptide
QLTPTWRVY

SEQ ID NO: 1890 - protein, 9 aa, synthetic construct
  REGION 1..9: note = Description of sequence: epitope presenting peptide
ASMPTTIAK

SEQ ID NO: 1891 - protein, 10 aa, synthetic construct
  REGION 1..10: note = Description of sequence: epitope presenting peptide
RFASVYAWNR

SEQ ID NO: 1892 - protein, 9 aa, synthetic construct
  REGION 1..9: note = Description of sequence: epitope presenting peptide
YNYLYRLFR

SEQ ID NO: 1893 - protein, 10 aa, synthetic construct
  REGION 1..10: note = Description of sequence: epitope presenting peptide
DDYQGKPLEF

SEQ ID NO: 1894 - protein, 9 aa, synthetic construct
  REGION 1..9: note = Description of sequence: epitope presenting peptide
KSNLKPFER

SEQ ID NO: 1895 - protein, 10 aa, synthetic construct
  REGION 1..10: note = Description of sequence: epitope presenting peptide
KFLPFQQFGR

SEQ ID NO: 1896 - protein, 11 aa, synthetic construct
  REGION 1..11: note = Description of sequence: epitope presenting peptide
SVYYTSNPTTF

SEQ ID NO: 1897 - protein, 9 aa, synthetic construct
  REGION 1..9: note = Description of sequence: epitope presenting peptide
QTNSPRRAR

SEQ ID NO: 1898 - protein, 9 aa, synthetic construct
  REGION 1..9: note = Description of sequence: epitope presenting peptide
YYTSNPTTF

SEQ ID NO: 1899 - protein, 10 aa, synthetic construct
  REGION 1..10: note = Description of sequence: epitope presenting peptide
STGSNVFQTR

SEQ ID NO: 1900 - protein, 11 aa, synthetic construct
  REGION 1..11: note = Description of sequence: epitope presenting peptide
YYTSNPTTFHL

SEQ ID NO: 1901 - protein, 9 aa, synthetic construct
  REGION 1..9: note = Description of sequence: epitope presenting peptide
GVVFLHVTY

SEQ ID NO: 1902 - protein, 11 aa, synthetic construct
  REGION 1..11: note = Description of sequence: epitope presenting peptide
FEYYHTTDPSF

SEQ ID NO: 1903 - protein, 9 aa, synthetic construct
  REGION 1..9: note = Description of sequence: epitope presenting peptide
HVSGTNGTK

SEQ ID NO: 1904 - protein, 9 aa, synthetic construct
  REGION 1..9: note = Description of sequence: epitope presenting peptide
YYKKDNSYF

SEQ ID NO: 1905 - protein, 10 aa, synthetic construct
  REGION 1..10: note = Description of sequence: epitope presenting peptide
DGVYFASTEK

SEQ ID NO: 1906 - protein, 9 aa, synthetic construct
  REGION 1..9: note = Description of sequence: epitope presenting peptide
FASVYAWNR

SEQ ID NO: 1907 - protein, 10 aa, synthetic construct
  REGION 1..10: note = Description of sequence: epitope presenting peptide
AYVDNSSLTI

SEQ ID NO: 1908 - protein, 10 aa, synthetic construct
  REGION 1..10: note = Description of sequence: epitope presenting peptide
NVYADSFVIR

SEQ ID NO: 1909 - protein, 8 aa, synthetic construct
  REGION 1..8: note = Description of sequence: epitope presenting peptide
AYILFTRF

SEQ ID NO: 1910 - protein, 9 aa, synthetic construct
  REGION 1..9: note = Description of sequence: epitope presenting peptide
FVIRGDEVR

SEQ ID NO: 1911 - protein, 9 aa, synthetic construct
  REGION 1..9: note = Description of sequence: epitope presenting peptide
AYILFTRFF

SEQ ID NO: 1912 - protein, 9 aa, synthetic construct
  REGION 1..9: note = Description of sequence: epitope presenting peptide
QIAPGQTGK

SEQ ID NO: 1913 - protein, 10 aa, synthetic construct
  REGION 1..10: note = Description of sequence: epitope presenting peptide
HFISNSWLMW

SEQ ID NO: 1914 - protein, 9 aa, synthetic construct
  REGION 1..9: note = Description of sequence: epitope presenting peptide
SVLNDILSR

SEQ ID NO: 1915 - protein, 10 aa, synthetic construct
  REGION 1..10: note = Description of sequence: epitope presenting peptide
TYERHSLSHF

SEQ ID NO: 1916 - protein, 10 aa, synthetic construct
  REGION 1..10: note = Description of sequence: epitope presenting peptide
HVTYVPAQEK

SEQ ID NO: 1917 - protein, 9 aa, synthetic construct
  REGION 1..9: note = Description of sequence: epitope presenting peptide
NASVVNIQK

SEQ ID NO: 1918 - protein, 10 aa, synthetic construct
  REGION 1..10: note = Description of sequence: epitope presenting peptide
TFISAARQGF

SEQ ID NO: 1919 - protein, 11 aa, synthetic construct
  REGION 1..11: note = Description of sequence: epitope presenting peptide
LPQGFSALEPL

SEQ ID NO: 1920 - protein, 9 aa, synthetic construct
  REGION 1..9: note = Description of sequence: epitope presenting peptide
DVFYKENSY

SEQ ID NO: 1921 - protein, 11 aa, synthetic construct
  REGION 1..11: note = Description of sequence: epitope presenting peptide
RVQPTESIVRF

SEQ ID NO: 1922 - protein, 10 aa, synthetic construct
  REGION 1..10: note = Description of sequence: epitope presenting peptide
DVVAIDYKHY

SEQ ID NO: 1923 - protein, 11 aa, synthetic construct
  REGION 1..11: note = Description of sequence: epitope presenting peptide
EVGHTDLMAAY

SEQ ID NO: 1924 - protein, 10 aa, synthetic construct
  REGION 1..10: note = Description of sequence: epitope presenting peptide
QPYRVVVLSF

SEQ ID NO: 1925 - protein, 10 aa, synthetic construct
  REGION 1..10: note = Description of sequence: epitope presenting peptide
SVPWDTIANY

SEQ ID NO: 1926 - protein, 10 aa, synthetic construct
  REGION 1..10: note = Description of sequence: epitope presenting peptide
TPCSFGGVSV

SEQ ID NO: 1927 - protein, 10 aa, synthetic construct
  REGION 1..10: note = Description of sequence: epitope presenting peptide
DTIANYAKPF

SEQ ID NO: 1928 - protein, 9 aa, synthetic construct
  REGION 1..9: note = Description of sequence: epitope presenting peptide
NTVKSVGKF

SEQ ID NO: 1929 - protein, 9 aa, synthetic construct
  REGION 1..9: note = Description of sequence: epitope presenting peptide
STAALGVLM

SEQ ID NO: 1930 - protein, 10 aa, synthetic construct
  REGION 1..10: note = Description of sequence: epitope presenting peptide
NSTNVTIATY

SEQ ID NO: 1931 - protein, 9 aa, synthetic construct
  REGION 1..9: note = Description of sequence: epitope presenting peptide
EPVLKGVKL

SEQ ID NO: 1932 - protein, 10 aa, synthetic construct
  REGION 1..10: note = Description of sequence: epitope presenting peptide
ETIQITISSF

SEQ ID NO: 1933 - protein, 9 aa, synthetic construct
  REGION 1..9: note = Description of sequence: epitope presenting peptide
DTFCAGSTF

SEQ ID NO: 1934 - protein, 10 aa, synthetic construct
  REGION 1..10: note = Description of sequence: epitope presenting peptide
EVARDLSLQF

SEQ ID NO: 1935 - protein, 8 aa, synthetic construct
  REGION 1..8: note = Description of sequence: epitope presenting peptide
SPRRARSV

SEQ ID NO: 1936 - protein, 10 aa, synthetic construct
  REGION 1..10: note = Description of sequence: epitope presenting peptide
TVKNGSIHLY

SEQ ID NO: 1937 - protein, 9 aa, synthetic construct
  REGION 1..9: note = Description of sequence: epitope presenting peptide
DSAEVAVKM

SEQ ID NO: 1938 - protein, 10 aa, synthetic construct
  REGION 1..10: note = Description of sequence: epitope presenting peptide
EVAVKMFDAY

SEQ ID NO: 1939 - protein, 9 aa, synthetic construct
  REGION 1..9: note = Description of sequence: epitope presenting peptide
YVNTFSSTF

SEQ ID NO: 1940 - protein, 14 aa, synthetic construct
  REGION 1..14: note = Description of sequence: epitope presenting peptide
EVTGDSCNNYMLTY

SEQ ID NO: 1941 - protein, 9 aa, synthetic construct
  REGION 1..9: note = Description of sequence: epitope presenting peptide
LVAEWFLAY

SEQ ID NO: 1942 - protein, 10 aa, synthetic construct
  REGION 1..10: note = Description of sequence: epitope presenting peptide
YVYANGGKGF

SEQ ID NO: 1943 - protein, 8 aa, synthetic construct
  REGION 1..8: note = Description of sequence: epitope presenting peptide
FPREGVFV

SEQ ID NO: 1944 - protein, 10 aa, synthetic construct
  REGION 1..10: note = Description of sequence: epitope presenting peptide
KFCLEASFNY

SEQ ID NO: 1945 - protein, 9 aa, synthetic construct
  REGION 1..9: note = Description of sequence: epitope presenting peptide
FPQSAPHGV

SEQ ID NO: 1946 - protein, 9 aa, synthetic construct
  REGION 1..9: note = Description of sequence: epitope presenting peptide
YIFFASFYY

SEQ ID NO: 1947 - protein, 9 aa, synthetic construct
  REGION 1..9: note = Description of sequence: epitope presenting peptide
KIYSKHTPI

SEQ ID NO: 1948 - protein, 9 aa, synthetic construct
  REGION 1..9: note = Description of sequence: epitope presenting peptide
SFYYVWKSY

SEQ ID NO: 1949 - protein, 9 aa, synthetic construct
  REGION 1..9: note = Description of sequence: epitope presenting peptide
MSALNHTKK

SEQ ID NO: 1950 - protein, 8 aa, synthetic construct
  REGION 1..8: note = Description of sequence: epitope presenting peptide
NITRFQTL

SEQ ID NO: 1951 - protein, 9 aa, synthetic construct
  REGION 1..9: note = Description of sequence: epitope presenting peptide
RIKASMPTT

SEQ ID NO: 1952 - protein, 9 aa, synthetic construct
  REGION 1..9: note = Description of sequence: epitope presenting peptide
KASMPTTIA

SEQ ID NO: 1953 - protein, 9 aa, synthetic construct
  REGION 1..9: note = Description of sequence: epitope presenting peptide
LVKNKCVNF

SEQ ID NO: 1954 - protein, 9 aa, synthetic construct
  REGION 1..9: note = Description of sequence: epitope presenting peptide
VLTESNKKF

SEQ ID NO: 1955 - protein, 9 aa, synthetic construct
  REGION 1..9: note = Description of sequence: epitope presenting peptide
ASRELKVTF

SEQ ID NO: 1956 - protein, 8 aa, synthetic construct
  REGION 1..8: note = Description of sequence: epitope presenting peptide
RLQSLQTY

SEQ ID NO: 1957 - protein, 9 aa, synthetic construct
  REGION 1..9: note = Description of sequence: epitope presenting peptide
KLINIIIWF

SEQ ID NO: 1958 - protein, 10 aa, synthetic construct
  REGION 1..10: note = Description of sequence: epitope presenting peptide
FERDISTEIY

SEQ ID NO: 1959 - protein, 9 aa, synthetic construct
  REGION 1..9: note = Description of sequence: epitope presenting peptide
SLDNVLSTF

SEQ ID NO: 1960 - protein, 14 aa, synthetic construct
  REGION 1..14: note = Description of sequence: epitope presenting peptide
FDNPVLPFNDGVYF

SEQ ID NO: 1961 - protein, 10 aa, synthetic construct
  REGION 1..10: note = Description of sequence: epitope presenting peptide
DTVIEVQGYK

SEQ ID NO: 1962 - protein, 9 aa, synthetic construct
  REGION 1..9: note = Description of sequence: epitope presenting peptide
GADPIHSLR

SEQ ID NO: 1963 - protein, 10 aa, synthetic construct
  REGION 1..10: note = Description of sequence: epitope presenting peptide
EVKPFITESK

SEQ ID NO: 1964 - protein, 9 aa, synthetic construct
  REGION 1..9: note = Description of sequence: epitope presenting peptide
LPPLLTDEM

SEQ ID NO: 1965 - protein, 9 aa, synthetic construct
  REGION 1..9: note = Description of sequence: epitope presenting peptide
ESKPSVEQR

SEQ ID NO: 1966 - protein, 10 aa, synthetic construct
  REGION 1..10: note = Description of sequence: epitope presenting peptide
QIPFAMQMAY

SEQ ID NO: 1967 - protein, 9 aa, synthetic construct
  REGION 1..9: note = Description of sequence: epitope presenting peptide
FAMQMAYRF

SEQ ID NO: 1968 - protein, 9 aa, synthetic construct
  REGION 1..9: note = Description of sequence: epitope presenting peptide
MLAHAEETR

SEQ ID NO: 1969 - protein, 10 aa, synthetic construct
  REGION 1..10: note = Description of sequence: epitope presenting peptide
HTTDPSFLGR

SEQ ID NO: 1970 - protein, 10 aa, synthetic construct
  REGION 1..10: note = Description of sequence: epitope presenting peptide
FEYVSQPFLM

SEQ ID NO: 1971 - protein, 9 aa, synthetic construct
  REGION 1..9: note = Description of sequence: epitope presenting peptide
TPVVQTIEV

SEQ ID NO: 1972 - protein, 13 aa, synthetic construct
  REGION 1..13: note = Description of sequence: epitope presenting peptide
TESIVRFPNITNL

SEQ ID NO: 1973 - protein, 11 aa, synthetic construct
  REGION 1..11: note = Description of sequence: epitope presenting peptide
KPHNSHEGKTF

SEQ ID NO: 1974 - protein, 9 aa, synthetic construct
  REGION 1..9: note = Description of sequence: epitope presenting peptide
FERDISTEI

SEQ ID NO: 1975 - protein, 12 aa, synthetic construct
  REGION 1..12: note = Description of sequence: epitope presenting peptide
KPVETSNSFDVL

SEQ ID NO: 1976 - protein, 11 aa, synthetic construct
  REGION 1..11: note = Description of sequence: epitope presenting peptide
YECDIPIGAGI

SEQ ID NO: 1977 - protein, 8 aa, synthetic construct
  REGION 1..8: note = Description of sequence: epitope presenting peptide
AEVQIDRL

SEQ ID NO: 1978 - protein, 10 aa, synthetic construct
  REGION 1..10: note = Description of sequence: epitope presenting peptide
NESLIDLQEL

SEQ ID NO: 1979 - protein, 10 aa, synthetic construct
  REGION 1..10: note = Description of sequence: epitope presenting peptide
FDEDDSEPVL

SEQ ID NO: 1980 - protein, 9 aa, synthetic construct
  REGION 1..9: note = Description of sequence: epitope presenting peptide
NINLHTQVV

SEQ ID NO: 1981 - protein, 9 aa, synthetic construct
  REGION 1..9: note = Description of sequence: epitope presenting peptide
LTIKKPNEL

SEQ ID NO: 1982 - protein, 9 aa, synthetic construct
  REGION 1..9: note = Description of sequence: epitope presenting peptide
SAMVRMYIF

SEQ ID NO: 1983 - protein, 9 aa, synthetic construct
  REGION 1..9: note = Description of sequence: epitope presenting peptide
MFDAYVNTF

SEQ ID NO: 1984 - protein, 13 aa, synthetic construct
  REGION 1..13: note = Description of sequence: epitope presenting peptide
TESNKKFLPFQQF

SEQ ID NO: 1985 - protein, 9 aa, synthetic construct
  REGION 1..9: note = Description of sequence: epitope presenting peptide
VLNEKCSAY

SEQ ID NO: 1986 - protein, 11 aa, synthetic construct
  REGION 1..11: note = Description of sequence: epitope presenting peptide
YENQKLIANQF

SEQ ID NO: 1987 - protein, 9 aa, synthetic construct
  REGION 1..9: note = Description of sequence: epitope presenting peptide
YLFDESGEF

SEQ ID NO: 1988 - protein, 9 aa, synthetic construct
  REGION 1..9: note = Description of sequence: epitope presenting peptide
YLKLTDNVY

SEQ ID NO: 1989 - protein, 9 aa, synthetic construct
  REGION 1..9: note = Description of sequence: epitope presenting peptide
KLVSSFLEM

SEQ ID NO: 1990 - protein, 10 aa, synthetic construct
  REGION 1..10: note = Description of sequence: epitope presenting peptide
ALRKVPTDNY

SEQ ID NO: 1991 - protein, 9 aa, synthetic construct
  REGION 1..9: note = Description of sequence: epitope presenting peptide
VVAIDYKHY

SEQ ID NO: 1992 - protein, 10 aa, synthetic construct
  REGION 1..10: note = Description of sequence: epitope presenting peptide
LVQMAPISAM

SEQ ID NO: 1993 - protein, 9 aa, synthetic construct
  REGION 1..9: note = Description of sequence: epitope presenting peptide
SSAKSASVY

SEQ ID NO: 1994 - protein, 9 aa, synthetic construct
  REGION 1..9: note = Description of sequence: epitope presenting peptide
QELGKYEQY

SEQ ID NO: 1995 - protein, 9 aa, synthetic construct
  REGION 1..9: note = Description of sequence: epitope presenting peptide
MSNLGMPSY

SEQ ID NO: 1996 - protein, 9 aa, synthetic construct
  REGION 1..9: note = Description of sequence: epitope presenting peptide
VVVNAANVY

SEQ ID NO: 1997 - protein, 9 aa, synthetic construct
  REGION 1..9: note = Description of sequence: epitope presenting peptide
LVSDIDITF

SEQ ID NO: 1998 - protein, 9 aa, synthetic construct
  REGION 1..9: note = Description of sequence: epitope presenting peptide
LPLVSSQCV

SEQ ID NO: 1999 - protein, 8 aa, synthetic construct
  REGION 1..8: note = Description of sequence: epitope presenting peptide
EPLVDLPI

SEQ ID NO: 2000 - protein, 8 aa, synthetic construct
  REGION 1..8: note = Description of sequence: epitope presenting peptide
YAWNRKRI

SEQ ID NO: 2001 - protein, 10 aa, synthetic construct
  REGION 1..10: note = Description of sequence: epitope presenting peptide
LEFGATSAAL

SEQ ID NO: 2002 - protein, 9 aa, synthetic construct
  REGION 1..9: note = Description of sequence: epitope presenting peptide
YGFQPTNGV

SEQ ID NO: 2003 - protein, 9 aa, synthetic construct
  REGION 1..9: note = Description of sequence: epitope presenting peptide
DAVRDPQTL

SEQ ID NO: 2004 - protein, 9 aa, synthetic construct
  REGION 1..9: note = Description of sequence: epitope presenting peptide
EVFAQVKQI

SEQ ID NO: 2005 - protein, 10 aa, synthetic construct
  REGION 1..10: note = Description of sequence: epitope presenting peptide
MELTPVVQTI

SEQ ID NO: 2006 - protein, 9 aa, synthetic construct
  REGION 1..9: note = Description of sequence: epitope presenting peptide
IANQFNSAI

SEQ ID NO: 2007 - protein, 9 aa, synthetic construct
  REGION 1..9: note = Description of sequence: epitope presenting peptide
YENFNQHEV

SEQ ID NO: 2008 - protein, 9 aa, synthetic construct
  REGION 1..9: note = Description of sequence: epitope presenting peptide
IAIPTNFTI

SEQ ID NO: 2009 - protein, 10 aa, synthetic construct
  REGION 1..10: note = Description of sequence: epitope presenting peptide
FLPFFSNVTW

SEQ ID NO: 2010 - protein, 10 aa, synthetic construct
  REGION 1..10: note = Description of sequence: epitope presenting peptide
IHADQLTPTW

SEQ ID NO: 2011 - protein, 10 aa, synthetic construct
  REGION 1..10: note = Description of sequence: epitope presenting peptide
SEDAQGMDNL

SEQ ID NO: 2012 - protein, 12 aa, synthetic construct
  REGION 1..12: note = Description of sequence: epitope presenting peptide
VAIHADQLTPTW

SEQ ID NO: 2013 - protein, 9 aa, synthetic construct
  REGION 1..9: note = Description of sequence: epitope presenting peptide
RSVASQSII

SEQ ID NO: 2014 - protein, 9 aa, synthetic construct
  REGION 1..9: note = Description of sequence: epitope presenting peptide
NSIAIPTNF

SEQ ID NO: 2015 - protein, 9 aa, synthetic construct
  REGION 1..9: note = Description of sequence: epitope presenting peptide
AEWFLAYIL

SEQ ID NO: 2016 - protein, 10 aa, synthetic construct
  REGION 1..10: note = Description of sequence: epitope presenting peptide
GVFVSNGTHW

SEQ ID NO: 2017 - protein, 10 aa, synthetic construct
  REGION 1..10: note = Description of sequence: epitope presenting peptide
VELGTEVNEF

SEQ ID NO: 2018 - protein, 9 aa, synthetic construct
  REGION 1..9: note = Description of sequence: epitope presenting peptide
VGYQPYRVV

SEQ ID NO: 2019 - protein, 9 aa, synthetic construct
  REGION 1..9: note = Description of sequence: epitope presenting peptide
FEPSTQYEY

SEQ ID NO: 2020 - protein, 9 aa, synthetic construct
  REGION 1..9: note = Description of sequence: epitope presenting peptide
YQPYRVVVL

SEQ ID NO: 2021 - protein, 9 aa, synthetic construct
  REGION 1..9: note = Description of sequence: epitope presenting peptide
FRSSVLHST

SEQ ID NO: 2022 - protein, 14 aa, synthetic construct
  REGION 1..14: note = Description of sequence: epitope presenting peptide
GELGDVRETMSYLF

SEQ ID NO: 2023 - protein, 9 aa, synthetic construct
  REGION 1..9: note = Description of sequence: epitope presenting peptide
FKNLREFVF

SEQ ID NO: 2024 - protein, 9 aa, synthetic construct
  REGION 1..9: note = Description of sequence: epitope presenting peptide
TRTQLPPAY

SEQ ID NO: 2025 - protein, 9 aa, synthetic construct
  REGION 1..9: note = Description of sequence: epitope presenting peptide
TRFASVYAW

SEQ ID NO: 2026 - protein, 14 aa, synthetic construct
  REGION 1..14: note = Description of sequence: epitope presenting peptide
KENSYTTTIKPVTY

SEQ ID NO: 2027 - protein, 9 aa, synthetic construct
  REGION 1..9: note = Description of sequence: epitope presenting peptide
QSAPHGVVF

SEQ ID NO: 2028 - protein, 9 aa, synthetic construct
  REGION 1..9: note = Description of sequence: epitope presenting peptide
YERHSLSHF

SEQ ID NO: 2029 - protein, 11 aa, synthetic construct
  REGION 1..11: note = Description of sequence: epitope presenting peptide
EESSAKSASVY

SEQ ID NO: 2030 - protein, 8 aa, synthetic construct
  REGION 1..8: note = Description of sequence: epitope presenting peptide
AEVAVKMF

SEQ ID NO: 2031 - protein, 9 aa, synthetic construct
  REGION 1..9: note = Description of sequence: epitope presenting peptide
AELAKNVSL

SEQ ID NO: 2032 - protein, 10 aa, synthetic construct
  REGION 1..10: note = Description of sequence: epitope presenting peptide
KQEILGTVSW

SEQ ID NO: 2033 - protein, 9 aa, synthetic construct
  REGION 1..9: note = Description of sequence: epitope presenting peptide
AEAELAKNV

SEQ ID NO: 2034 - protein, 9 aa, synthetic construct
  REGION 1..9: note = Description of sequence: epitope presenting peptide
QEILGTVSW

SEQ ID NO: 2035 - protein, 9 aa, synthetic construct
  REGION 1..9: note = Description of sequence: epitope presenting peptide
EEVVENPTI

SEQ ID NO: 2036 - protein, 12 aa, synthetic construct
  REGION 1..12: note = Description of sequence: epitope presenting peptide
EEVGHTDLMAAY

SEQ ID NO: 2037 - protein, 9 aa, synthetic construct
  REGION 1..9: note = Description of sequence: epitope presenting peptide
EAKKVKPTV

SEQ ID NO: 2038 - protein, 8 aa, synthetic construct
  REGION 1..8: note = Description of sequence: epitope presenting peptide
MPYFFTLL

SEQ ID NO: 2039 - protein, 10 aa, synthetic construct
  REGION 1..10: note = Description of sequence: epitope presenting peptide
MPTTIAKNTV

SEQ ID NO: 2040 - protein, 9 aa, synthetic construct
  REGION 1..9: note = Description of sequence: epitope presenting peptide
EGYLNSTNV

SEQ ID NO: 2041 - protein, 276 aa, synthetic construct
  REGION 1..276: note = Description of sequence: HLA-B*1501 sequence
GSHSMRYFYTAMSRPGRGEPRFIAVGYVDDTQFVRFDSDAASPRMAPRAPWIEQEGPEYWDRETQISKTNTQTYRESLRNLRGYYNQSEAGSHTLQRMYGCDVGPDGRLLRGHDQSAYDGKDYIALNEDLSSWTAADTAAQITQRKWEAAREAEQWRAYLEGLCVEWLRRYLENGKETLQRADPPKTHVTHHPISDHEATLRCWALGFYPAEITLTWQRDGEDQTQDTELVETRPAGDRTFQKWAAVVVPSGEEQRYTCHVQHEGLPKPLTLRWEP

SEQ ID NO: 2042 - protein, 276 aa, synthetic construct
  REGION 1..276: note = Description of sequence: HLA-B*2705 sequence
GSHSMRYFHTSVSRPGRGEPRFITVGYVDDTLFVRFDSDAASPREEPRAPWIEQEGPEYWDRETQICKAKAQTDREDLRTLLRYYNQSEAGSHTLQNMYGCDVGPDGRLLRGYHQDAYDGKDYIALNEDLSSWTAADTAAQITQRKWEAARVAEQLRAYLEGECVEWLRRYLENGKETLQRADPPKTHVTHHPISDHEATLRCWALGFYPAEITLTWQRDGEDQTQDTELVETRPAGDRTFQKWAAVVVPSGEEQRYTCHVQHEGLPKPLTLRWEP

SEQ ID NO: 2043 - protein, 9 aa, synthetic construct
  REGION 1..9: note = Description of sequence: epitope presenting peptide
SLSKGVHFV

SEQ ID NO: 2044 - protein, 9 aa, synthetic construct
  REGION 1..9: note = Description of sequence: epitope presenting peptide
ALSKGVYFV

SEQ ID NO: 2045 - protein, 9 aa, synthetic construct
  REGION 1..9: note = Description of sequence: epitope presenting peptide
KIFPPTEPK

SEQ ID NO: 2046 - protein, 9 aa, synthetic construct
  REGION 1..9: note = Description of sequence: epitope presenting peptide
KCYGVSLTK

SEQ ID NO: 2047 - protein, 10 aa, synthetic construct
  REGION 1..10: note = Description of sequence: epitope presenting peptide
ATDGALNTPK

SEQ ID NO: 2048 - protein, 9 aa, synthetic construct
  REGION 1..9: note = Description of sequence: epitope presenting peptide
KSTNLVKNK

SEQ ID NO: 2049 - protein, 9 aa, synthetic construct
  REGION 1..9: note = Description of sequence: epitope presenting peptide
RAAEIRASA

SEQ ID NO: 2050 - protein, 9 aa, synthetic construct
  REGION 1..9: note = Description of sequence: epitope presenting peptide
SPRRARSVV

SEQ ID NO: 2051 - protein, 9 aa, synthetic construct
  REGION 1..9: note = Description of sequence: epitope presenting peptide
HRNAPRITF

SEQ ID NO: 2052 - protein, 9 aa, synthetic construct
  REGION 1..9: note = Description of sequence: epitope presenting peptide
LRNAPRITF

SEQ ID NO: 2053 - protein, 9 aa, synthetic construct
  REGION 1..9: note = Description of sequence: epitope presenting peptide
QRNALRITF

SEQ ID NO: 2054 - protein, 9 aa, synthetic construct
  REGION 1..9: note = Description of sequence: epitope presenting peptide
QRNASRITF

SEQ ID NO: 2055 - protein, 9 aa, synthetic construct
  REGION 1..9: note = Description of sequence: epitope presenting peptide
QRNAFRITF

SEQ ID NO: 2056 - protein, 9 aa, synthetic construct
  REGION 1..9: note = Description of sequence: epitope presenting peptide
TPLGTWLTY

SEQ ID NO: 2057 - protein, 10 aa, synthetic construct
  REGION 1..10: note = Description of sequence: epitope presenting peptide
MEVTPLGTWL

SEQ ID NO: 2058 - protein, 9 aa, synthetic construct
  REGION 1..9: note = Description of sequence: Nsp13 epitope
VMPLSAPTL

SEQ ID NO: 2059 - protein, 9 aa, synthetic construct
  REGION 1..9: note = Description of sequence: epitope presenting peptide
QMPSRSLLF

SEQ ID NO: 2060 - protein, 9 aa, synthetic construct
  REGION 1..9: note = Description of sequence: epitope presenting peptide
TLPKRGLFL

SEQ ID NO: 2061 - protein, 9 aa, synthetic construct
  REGION 1..9: note = Description of sequence: epitope presenting peptide
TGPWRSLWI

SEQ ID NO: 2062 - protein, 9 aa, synthetic construct
  REGION 1..9: note = Description of sequence: epitope presenting peptide
ILTDRSLWL

SEQ ID NO: 2063 - protein, 9 aa, synthetic construct
  REGION 1..9: note = Description of sequence: epitope presenting peptide
VNPGRSLFL

SEQ ID NO: 2064 - protein, 9 aa, synthetic construct
  REGION 1..9: note = Description of sequence: epitope presenting peptide
WNRLFPPLR

SEQ ID NO: 2065 - protein, 9 aa, synthetic construct
  REGION 1..9: note = Description of sequence: epitope presenting peptide
TLPERTLYL

SEQ ID NO: 2066 - protein, 9 aa, synthetic construct
  REGION 1..9: note = Description of sequence: epitope presenting peptide
FLPNRSLLF

SEQ ID NO: 2067 - protein, 9 aa, synthetic construct
  REGION 1..9: note = Description of sequence: epitope presenting peptide
VMGDRSVLY

SEQ ID NO: 2068 - protein, 9 aa, synthetic construct
  REGION 1..9: note = Description of sequence: epitope presenting peptide
VMADKSIFY

SEQ ID NO: 2069 - protein, 9 aa, synthetic construct
  REGION 1..9: note = Description of sequence: epitope presenting peptide
VMPPRTLLL

SEQ ID NO: 2070 - protein, 9 aa, synthetic construct
  REGION 1..9: note = Description of sequence: epitope presenting peptide
VMAPRTLFL

SEQ ID NO: 2071 - protein, 9 aa, synthetic construct
  REGION 1..9: note = Description of sequence: epitope presenting peptide
QMPSRSLLF

SEQ ID NO: 2072 - protein, 9 aa, synthetic construct
  REGION 1..9: note = Description of sequence: epitope presenting peptide
VMPGRTLCF

SEQ ID NO: 2073 - protein, 9 aa, synthetic construct
  REGION 1..9: note = Description of sequence: epitope presenting peptide
RMPPRSVLL

SEQ ID NO: 2074 - protein, 9 aa, synthetic construct
  REGION 1..9: note = Description of sequence: epitope presenting peptide
TAPARTMFL

SEQ ID NO: 2075 - protein, 9 aa, synthetic construct
  REGION 1..9: note = Description of sequence: epitope presenting peptide
NMPARTVLF

SEQ ID NO: 2076 - protein, 9 aa, synthetic construct
  REGION 1..9: note = Description of sequence: epitope presenting peptide
WNRILPNAY

SEQ ID NO: 2077 - protein, 10 aa, synthetic construct
  REGION 1..10: note = Description of sequence: epitope presenting peptides
  REGION 1: note = Amino acid can be absent
  REGION 10: note = Amino acid can be absent
  VARIANT 1: note = Xaa can be S, K, A, I, L, OR T
  VARIANT 2: note = V can be L, I, or K
  VARIANT 3: note = Xaa can be P, A or S;
  VARIANT 4: note = Xaa can be G, V, P, D or R
  VARIANT 6: note = S can be T
  VARIANT 7: note = V can be I or L
  VARIANT 8: note = Xaa can be F, W,or E
  VARIANT 9: note = Xaa can be L. F, W or E
  VARIANT 10: note = Xaa can be F, H, S, or A
XVXXRSVXXX

SEQ ID NO: 2078 - protein, 8 aa, synthetic construct
  REGION 1..8: note = Description of sequence: epitope presenting peptide
  VARIANT 3: note = Xaa can be G or V
LPXRSLFL

SEQ ID NO: 2079 - protein, 8 aa, synthetic construct
  REGION 1..8: note = Description of sequence: epitope presenting peptide
  VARIANT 3: note = Xaa can be G or V
LPXRSLWL

SEQ ID NO: 2080 - protein, 9 aa, synthetic construct
  REGION 1..9: note = Description of sequence: epitope presenting peptide
VLPHRTQFL

SEQ ID NO: 2081 - protein, 9 aa, synthetic construct
  REGION 1..9: note = Description of sequence: epitope presenting peptide
TGAARSFFF

SEQ ID NO: 2082 - protein, 9 aa, synthetic construct
  REGION 1..9: note = Description of sequence: epitope presenting peptide
VMAPRTLIL

SEQ ID NO: 2083 - protein, 9 aa, synthetic construct
  REGION 1..9: note = Description of sequence: epitope presenting peptide
SAPLKTRFL

SEQ ID NO: 2084 - protein, 9 aa, synthetic construct
  REGION 1..9: note = Description of sequence: epitope presenting peptide
SVPLKTRFL

SEQ ID NO: 2085 - protein, 10 aa, synthetic construct
  REGION 1..10: note = Description of sequence: epitope presenting peptide
AAGLEAPFLY

SEQ ID NO: 2086 - protein, 130 aa, synthetic construct
  REGION 1..130: note = Description of sequence: modified human IL-2 polypeptide sequence
  VARIANT 15: note = Xaa can be any amino acid other than E, or A
  VARIANT 16: note = Xaa can be any amino acid other than H, or is A, E, D, T, N, C, Q, M, V or W
  VARIANT 20: note = Xaa can be any amino acid other than D or is A;
  VARIANT 42: note = Xaa can be any amino acid other than F, or is A, M, P, S, T, Y, V or H
  VARIANT 45: note = Xaa can be any amino acid other than Y, or is A
  VARIANT 88: note = Xaa can be any amino acid other than N, or is A or R
  VARIANT 126: note = Xaa can be any amino acid other than Q, or is A
APTSSSTKKTQLQLXXLLLXLQMILNGINNYKNPKLTRMLTXKFXMPKKATELKHLQCLEEELKPLEEVLNLAQSKNFHLRPRDLISXINVIVLELKGSETTFMCEYADETATIVEFLNRWITFCXSIIS

SEQ ID NO: 2087 - protein, 133 aa, synthetic construct
  REGION 1..133: note = Description of sequence: modified human IL-2 polypeptide sequence
  VARIANT 16: note = Xaa can be any amino acid other than H, usually A or T
  VARIANT 42: note = Xaa can be any amino acid is other than F, usually A or T
APTSSSTKKTQLQLEXLLLDLQMILNGINNYKNPKLTRMLTXKFYMPKKATELKHLQCLEEELKPLEEVLNLAQSKNFHLRPRDLISNINVIVLELKGSETTFMCEYADETATIVEFLNRWITFCQSIISTLT

SEQ ID NO: 2088 - protein, 132 aa, synthetic construct
  REGION 1..132: note = Description of sequence: modified human IL-2 polypeptide with H16A and F42A substitutions
PTSSSTKKTQLQLEALLLDLQMILNGINNYKNPKLTRMLTAKFYMPKKATELKHLQCLEEELKPLEEVLNLAQSKNFHLRPRDLISNINVIVLELKGSETTFMCEYADETATIVEFLNRWITFCQSIISTLT

SEQ ID NO: 2089 - protein, 9 aa, synthetic construct
  REGION 1..9: note = Description of sequence: epitope presenting peptide
AVLDMASLK

SEQ ID NO: 2090 - protein, 9 aa, synthetic construct
  REGION 1..9: note = Description of sequence: epitope presenting peptide
GYINVFAFF

SEQ ID NO: 2091 - protein, 9 aa, synthetic construct
  REGION 1..9: note = Description of sequence: epitope presenting peptide
AEVGPEHSL

SEQ ID NO: 2092 - protein, 99 aa, synthetic construct
  REGION 1..99: note = Description of sequence: mature human beta 2 microglobulin protein NP_004039.1 with a cysteine substitution at position 44
IQRTPKIQVYSRHPAENGKSNFLNCYVSGFHPSDIEVDLLKNGCRIEKVEHSDLSFSKDWSFYLLYYTEFTPTEKDEYACRVNHVTLSQPKIVKWDRDM

1. A T cell modulatory polypeptide-epitope conjugate (T-Cell-MP-epitope conjugate), the polypeptide comprising:
(i) optionally one or more independently selected MOD polypeptide sequences, or two or more MOD polypeptide sequences, wherein when there are two or more MOD polypeptide sequences they are optionally joined to each other by independently selected L1 linkers,
(ii) an optional L2 linker polypeptide sequence joining the one or more MOD polypeptide sequences to a β2M polypeptide sequence,
(iii) the β2M polypeptide sequence,
(iv) an optional L3 linker polypeptide sequence comprising from 15 to 50 amino acids,
(v) a class I MHC-H polypeptide sequence,
(vi) an optional L4 linker polypeptide sequence,
(vii) a scaffold polypeptide sequence,
(viii) an optional L5 linker polypeptide sequence, and
(ix) optionally one or more independently selected MOD polypeptide sequences or two or more MOD polypeptide sequences optionally joined to each other by independently selected L6 linkers;
wherein
the T-Cell-MP-epitope conjugate comprises at least one MOD polypeptide sequence,
the MHC-H polypeptide sequence comprises a cysteine at position 84 and position 139 that may form a disulfide bond,
at least one of the β2M polypeptide sequence, the L3 linker polypeptide sequence, and/or the MHC-H polypeptide sequence comprises one or more chemical conjugation sites for epitope conjugation to which a peptide presenting a coronavirus epitope is covalently bound, directly or indirectly,
the β2M polypeptide sequence has at least 90% or at least 90% sequence identity to at least 90 or 95, contiguous aas of a mature human β2M polypeptide of SEQ ID NO:61, and
the peptide presenting a coronavirus epitope comprises seven or more contiguous amino acids of any of the coronavirus protein or peptide sequences set forth in FIGS. 20A to 20J, FIG. 21, FIG. 22, Table 2, Table 3, or Table 3a.

2. (canceled)

3. The T-Cell-MP-epitope conjugate of claim 1, wherein the MHC-H polypeptide sequence comprises a human class I MHC-H chain polypeptide sequence selected from HLA-A, HLA-B, HLA-C, HLA-E, HLA-F, and HLA-G MHC-H polypeptide sequences having:
(i) at least 90%, or at least 95%, sequence identity to at least 200 or at least 225 contiguous aas of a MHC-H polypeptide sequence provided in any of FIGS. 3A-3H or an HLA consensus polypeptide sequence recited in FIG. 3I; or
(ii) at least 95% or at least 98% sequence identity to at least 250 contiguous aas of a MHC-H polypeptide provided in any of FIGS. 3A-3H.

4. The T-Cell-MP-epitope conjugate of claim 3, wherein:
the peptide presenting a coronavirus epitope comprises 6-25 or 8-25 contiguous amino acids of a SARS-CoV-2 variant spike protein epitope that comprises a sequence selected from the group consisting of: KVGGNYNYR (SEQ ID NO:473); KGFNCYFPL (SEQ ID NO: 475); DVYYHKNNK (SEQ ID NO:477); NSANLAAIK (SEQ ID NO:480); RFANPVLPF (SEQ ID NO:482); AYSNNSIAIPINF (SEQ ID NO:484); PINLVRGL (SEQ ID NO:486); SRRRARSVA (SEQ ID NO:487); IPINFTISV (SEQ ID NO:489); NLRTRTQL (SEQ ID NO:491); NFTNRTQL (SEQ ID NO:492); LXXXHRSYL (SEQ ID NO: 494); LPSAYTNSF (SEQ ID NO:496); and AEYVNNSY (SEQ ID NO:498); or
wherein the peptide presenting a coronavirus epitope comprises a peptide of the spike protein of SEQ ID NO:566 bearing one or two sequence changes selected from the group consisting of T19R, A67V, del69-70, (V70F*), T95I, G142D, del142-144, Y145D, R158G, del211, L212I, ins214EPE, (A222V*), (W258L*), G339D, S371L, S373P, S375F, K417N, N440K, G446S, L452R, S477N, T478K, E484A, Q493R, G496S, Q498R, N501Y, Y505H, T547K, D614G, H655Y, N679K, P681H, P681R, N764K, D796Y, N856K, D950N, Q954H, N969K, and L981F.

5-19. (canceled)

20. A T cell modulatory polypeptide-epitope conjugate (T-Cell-MP-epitope conjugate), the polypeptide comprising:
(i) optionally one or more independently selected MOD polypeptide sequences, or two or more MOD polypeptide sequences, wherein when there are two or more MOD polypeptide sequences they are optionally joined to each other by independently selected L1 linkers,
(ii) an optional L2 linker polypeptide sequence joining the one or more MOD polypeptide sequences to a β2M polypeptide sequence,
(iii) the β2M polypeptide sequence,
(iv) an optional L3 linker polypeptide sequence comprising from 15 to 50 amino acids,
(v) an HLA-E polypeptide sequence,
(vi) an optional L4 linker polypeptide sequence,
(vii) a scaffold polypeptide sequence,
(viii) an optional L5 linker polypeptide sequence, and
(ix) optionally one or more independently selected MOD polypeptide sequences or two or more MOD polypeptide sequences optionally joined to each other by independently selected L6 linkers;
wherein
the T-Cell-MP-epitope conjugate comprises at least one MOD polypeptide sequence,
the MHC-H polypeptide sequence comprises a cysteine at position 84 and position 139 that may form a disulfide bond,
at least one of the β2M polypeptide sequence, the L3 linker polypeptide sequence, and/or the HLA-E polypeptide sequence comprises one or more chemical conjugation sites to which a peptide that presents an HLA-E restricted non-coronavirus epitope is covalently bound, directly or indirectly, and
the β2M polypeptide sequence has at least 90% sequence identity at least 90 or 95 contiguous aas of a mature human β2M polypeptide of SEQ ID NO:61; and
wherein the peptide presenting an HLA-E restricted non-coronavirus epitope comprises
(a) an aa sequence selected from the group consisting of: QMPSRSLLF (SEQ ID NO: 2059), TLPKRGLFL (SEQ ID NO:2060), TGPWRSLWI (SEQ ID NO:2061), ILTDRSLWL (SEQ ID NO:2062), VNPGRSLFL (SEQ ID NO:2063), WNRLFPPLR (SEQ ID NO:2064), TLPERTLYL (SEQ ID NO:2065), FLPNRSLLF (SEQ ID NO: 2066), VMGDRSVLY (SEQ ID NO:2067), and VMADKSIFY (SEQ ID NO: 2068),
(b) an aa sequence selected from the group consisting of: VMPPRTLLL (SEQ ID NO.: 2069), VMAPRTLFL (SEQ ID NO:2070), VNPGRSLFL (SEQ ID NO:2063), QMPSRSLLF (SEQ ID NO.: 2071), TLPERTLYL (SEQ ID NO:2065), VMPGRTLCF (SEQ ID NO:2072), ILTDRSLWL (SEQ ID NO:262), RMPPRSVLL (SEQ ID NO:2073), TAPARTMFL (SEQ ID NO.: 2074), and NMPARTVLF (SEQ ID NO: 2075),
(c) aa sequence WNRILPNAY (SEQ ID NO:2076),
(d) the aa sequence X1-X2-X3-X4-R-X6-X7-X8-X9-X10, where: X1 is absent or S, K, A, I, L, or T; X2 is L, I, K or V; X3 is P, A or S; X4 is G, V, P, D or R; X6 is S or T; X7 is L, I, or V; X8 is F, W, or E; X9 is L. F, W or E; and X10 F, H, S, A or absent (SEQ ID NO:2077),
(e) the aa sequence LP (G or V) RSLFL (SEQ ID NO:2078), or LP (G or V) RSLWL (SEQ ID NO: 2079),
(f) a CMV aa sequence selected from the group consisting of: VLPHRTQFL (SEQ ID NO: 2080), TGAARSFFF (SEQ ID NO:2081), and VMAPRTLIL (SEQ ID NO: 2082), or
(g) a CMV aa sequence selected from the group consisting of: SAPLKTRFL (SEQ ID NO: 2083) and SVPLKTRFL (SEQ ID NO:2084).

21. (canceled)

22. The T-Cell-MP-epitope conjugate of claim 20, wherein the MHC-H polypeptide sequence has:
(i) at least 90% or at least 95% sequence identity to at least 225 contiguous aas of an HLA-E allele; or
(ii) at least 90% or at least 95% sequence identity to at least 225 or at least 250 contiguous aas of an HLA-E*0101, HLA-E*01:03, HLA-E*01:04, HLA-E*01:05, HLA-E*01:06, HLA-E*01:07, HLA-E*01:09, or HLA-E*01:10 polypeptide sequence, or the HLA-E consus sequence of FIG. 3H (SEQ ID NO:58).

23. The T-Cell-MP-epitope conjugate of claim 3, wherein the scaffold polypeptide sequence comprises a non-interspecific sequence or interspecific sequence.

24. The T-Cell-MP-epitope conjugate of claim 3, complexed to form a duplex T-Cell-MP-epitope conjugate or other higher order T-Cell-MP-epitope conjugate comprising at least a first T-Cell-MP-epitope conjugate and a second T-Cell-MP-epitope conjugate of claim 3,
wherein
(i) the first T-Cell-MP-epitope conjugate comprises a first β2M polypeptide sequence; a first class I MHC-H polypeptide sequence; and a first scaffold polypeptide; and
(ii) the second T-Cell-MP-epitope conjugate comprises a second β2M polypeptide sequence; a second class I MHC-H polypeptide sequence; and a second scaffold polypeptide; and
wherein the first and second T-Cell-MP-epitope conjugates associate by binding interactions between the first and second scaffold polypeptides that optionally include at least one, or at least two, interchain covalent bonds.

25-27. (canceled)

28. The T-Cell-MP-epitope conjugate or the duplex or higher order T-Cell-MP-epitope conjugate of claim 24, comprising:
(i) at least one or at least two wt. MOD and/or variant MOD polypeptide sequences; or
(ii) at least three or at least four wt. MOD and/or variant MOD polypeptide sequences.

29. The T-Cell-MP-epitope conjugate or duplex T-Cell-MP-epitope conjugate of claim 28, wherein the MOD polypeptide sequences are selected independently from the group consisting of: IL-1, IL-2, IL-4, IL-6, IL-7, IL-10, IL-12, IL-15, IL-17, IL-21, IL-23, CD7, CD30L, CD40, CD70, CD80, (B7-1), CD83, CD86 (B7-2), HVEM (CD270), ILT3 (Ig-like transcript 3), ILT4 (Ig-like transcript 4), Fas ligand (FasL), ICAM (intercellular adhesion molecule), ICOS-L (inducible costimulatory ligand), JAG1 (CD339), lymphotoxin beta receptor, 3/TR6, OX40L (CD252), PD-L1, PD-L2, TGF-β1, TGF-β2, TGF-β3, 4-1BBL and anti-CD28 polypeptide sequences.

30. (canceled)

31. The T-Cell-MP-epitope conjugate or duplex T-Cell-MP-epitope conjugate of claim 28, wherein the MOD polypeptide sequences comprise at least one independently selected wt. IL-2 and/or variant IL-2 MOD polypeptide sequence comprising aa substitution at H16 and/or F42.

32. The T-Cell-MP-epitope conjugate or duplex T-Cell-MP-epitope conjugate of claim 29, wherein each chemical conjugation site is jointly or independently selected from: a) amino acid chemical conjugation sites; b) non-natural amino acids and/or selenocysteines; c) peptide sequences that act as an enzymatic modification sequence (e.g., a sulfatase motif); d) carbohydrate or oligosaccharide moieties; and/or e) IgG nucleotide binding sites.

33. (canceled)

34. The T-Cell-MP-epitope conjugate, duplex T-Cell-MP-epitope conjugate, or higher order T-cell-MP-epitope conjugate of claim 32, further comprising at least one, or at least two, additional polypeptides each of which is an independently selected Cancer Targeting Polypeptide (CTP) that binds to an independently selected antigenic determinates on the same or different antigens, and may be the same or different.

35-37. (canceled)

38. A method of treatment or prophylaxis of a coronavirus infection or condition associated with coronavirus infection comprising:
(i) administering to a patient or subject (e.g., a patient in need thereof) an effective amount of one or more T-Cell-MP-epitope conjugates or one or more duplex T-Cell-MP-epitope conjugates or other higher order complexes of T-Cell-MP-epitope conjugates of claim 32; or
(ii) contacting a cell or tissue in vitro or in vivo with one or more T-Cell-MP-epitope conjugates or one or more duplex T-Cell-MP-epitope conjugates or other higher order complexes of T-Cell-MP-epitope conjugates according to claim 32, and administering the cell, tissue, or progeny thereof to a patient or subject (e.g., a patient in need thereof);
wherein the coronavirus infection or condition associated with coronavirus infection includes, but not limited to, primary coronavirus infections, secondary coronavirus infections, and long COVID.

39. A method of controlling a coronavirus infection or of reducing transmission of coronavirus comprising
(i) administering to a patient or subject (e.g., a patient in need thereof) an effective amount of one or more T-Cell-MP-epitope conjugates or one or more duplex T-Cell-MP-epitope conjugates or other higher order complexes of T-Cell-MP-epitope conjugates of T-Cell-MP-epitope conjugates of claim 32; or
(ii) contacting a cell or tissue in vitro or in vivo with one or more T-Cell-MP-epitope conjugates or one or more duplex T-Cell-MP-epitope conjugates or other higher order complexes of T-Cell-MP-epitope conjugates of claim 32, and administering the cell, tissue, or progeny thereof to a patient or subject (e.g., a patient in need thereof).

40. The method of claim 38, wherein when the one or more T-Cell-MP-epitope conjugates, duplex T-Cell-MP-epitope conjugates or other higher order complexes of T-Cell-MP-epitope conjugates comprise a peptide presenting an HLA-E restricted coronavirus epitope.

41. The method of claim 39, wherein when the one or more T-Cell-MP-epitope conjugates, duplex T-Cell-MP-epitope conjugates or other higher order complexes of T-Cell-MP-epitope conjugates comprise a peptide presenting an HLA-E restricted coronavirus epitope.

42. A method of providing treatment or prophylaxis to a patient or subject having, or suspected of having, or developing a neoplasm comprising:
(i) administering to a patient or subject an effective amount of one or more T-Cell-MP-epitope conjugates, one or more duplex T-Cell-MP-epitope conjugates, or other higher order complexes of T-Cell-MP-epitope conjugates of claim 34; or
(ii) contacting a cell or tissue (e.g., a cell or tissue of the patient or subject) in vitro or in vivo with one or more T-Cell-MP-epitope conjugates or duplex T-Cell-MP-epitope conjugates of claim 34, and administering the cell, tissue, or progeny thereof to a patient/subject (e.g., a patient in need thereof).

43-44. (canceled)

45. The method of claim 42, wherein the MHC-H polypeptide sequence of the one or more T-Cell-MP-epitope conjugates, one or more duplex T-Cell-MP-epitope conjugates, or other higher order complexes of T-Cell-MP-epitope conjugates comprises an HLA-E polypeptide sequence.

46. (canceled)

47. The method of 45, wherein the one or more T-Cell-MP-epitope conjugates or one or more duplex T-Cell-MP-epitope conjugates or other higher order complexes of T-Cell-MP-epitope conjugates are conjugate to a non-coronavirus HLA-E restricted epitope.

48-55. (canceled)
